(19) United States
(12) Patent Application Publication
(10) Pub. No.: US 2026/0158159 A1
(43) Pub. Date: Jun. 11, 2026

(54) Fc-ACYLATED POLYPEPTIDE CONJUGATES

(71) Applicant: ELI LILLY AND COMPANY, Indianapolis, IN (US)

(72) Inventors: Robert Andrew BROWN, Carmel, IN (US); Guillermo S. CORTEZ, Indianapolis, IN (US); Paul Joseph KLEINDL, Lebanon, IN (US); Dahamsondage Nuwan KONDASINGHE, Indianapolis, IN (US); Daniel LOPES, Indianapolis, IN (US); Faiz Ahmad MOHAMMED, Carmel, IN (US); Avinash MUPPIDI, Carmel, IN (US); David John STOKELL, Indianapolis, IN (US); Yan WANG, Carmel, IN (US)

(21) Appl. No.: 19/279,475

(22) Filed: Jul. 24, 2025

Related U.S. Application Data
(60) Provisional application No. 63/675,095, filed on Jul. 24, 2024.

(51) Int. Cl. A61K 47/68; A61P 3/04; C07K 14/00

(52) U.S. Cl. CPC A61K 47/6811; A61K 47/68; A61P 3/04; C07K 14/001

(57) ABSTRACT

Compounds comprising therapeutic polypeptide Fc conjugates are provided that have activity at one or more of the GIP, GLP-1 and glucagon receptors. The compounds have structural features resulting in activity and extended duration of action at one or more of these receptors. Methods also are provided for treating diseases and/or conditions such as obesity, chronic weight management, and type 2 diabetes mellitus.

### SEQUENCE LISTING

[0001] The present application is being filed along with a Sequence Listing in ST.26 XML format. The Sequence Listing is provided as a file titled “30783_WO_SL.xml” created Jul. 21, 2025 and is 5,378,048 bytes in size. The Sequence Listing information in the ST.26 XML format is incorporated herein by reference in its entirety.

### FIELD

[0002] This disclosure pertains to novel compounds, specifically therapeutic polypeptide Fc conjugates, designed to exhibit extended therapeutic effects on, for example, glucose-dependent insulinotropic polypeptide (GIP), glucagon-like peptide-1 (GLP-1), and/or glucagon (GCG) receptors. These conjugates incorporate structural modifications that optimize receptor activity and enhance the duration of action, offering improved pharmacological profiles for therapeutic applications.

### BACKGROUND

[0003] The prevalence of diabetes mellitus continues to increase, representing a chronic condition marked by persistent hyperglycemia due to disruptions in insulin secretion, insulin function, or both. Type 2 diabetes mellitus (T2DM) is the most common form, accounting for approximately 90% of cases. In T2DM, elevated blood glucose levels result from a combination of impaired insulin secretion and insulin resistance.

[0004] Unmanaged diabetes in individuals may contribute to various health complications that affect both quality of life and overall survival. Excess weight is a significant risk factor for T2DM, and a large proportion of individuals with T2DM, approximately 90%, are classified as overweight or living with obesity. Research suggests that reducing body adiposity may contribute to improvements in health conditions associated with obesity.

[0005] The standard approach to managing T2DM involves lifestyle modifications, including diet and exercise, along with pharmacologic interventions such as oral and injectable incretin-based therapies and insulin treatments. Injectable incretin-based therapies currently available include GLP-1 receptor agonists, such as dulaglutide and semaglutide, as well as the dual GIP and GLP-1 receptor agonist, tirzepatide. Therapeutics containing semaglutide and tirzepatide have also been approved to support weight reduction and long-term weight management in individuals who are overweight or living with obesity. Research has been conducted on additional compounds stated to have dual agonist activity at the GIP and GLP-1 receptors, such as those described in US20200024322, as well as compounds stated to have triple agonist activity at the GIP, GLP-1 and glucagon receptors, such as those described in US20240270821. Additionally, insulin therapy remains a cornerstone of diabetes management, particularly for individuals with advanced disease or significant insulin deficiency.

[0006] However, currently available injectable incretin-based and insulin therapies generally require at least weekly administration. Many individuals may prefer options requiring fewer injections, and expanding treatment availability to include less frequent administration could enhance patient adherence, acceptance, and overall treatment success.

[0007] Several approaches for enhancing duration of action of protein or peptide therapeutics have been suggested. Such approaches include conjugation of the therapeutic to an Fc region of an antibody (see, for example, WO2016/131893) and lipidation with a fatty acid moiety (see, for example, US2020/0283492). Further, A. Zaykov, et al (2024), RSC Chem. Biol. describes the effects of a combination of lipidation and Fc-conjugation on the pharmacokinetic and pharmacodynamic profile of an insulin molecule.

[0008] Nevertheless, there remains a need for innovative treatment options that provide an extended duration of therapeutic action while reducing the frequency of administration compared to currently available therapies. Addressing this need could enhance patient adherence, improve treatment outcomes, and offer a more convenient approach to disease management.

### SUMMARY

[0009] In a first aspect, the present disclosure provides a compound of the formula:

[chemical structure]

or a pharmaceutically acceptable salt thereof, wherein:
[0010] X_{TPP} is a therapeutic polypeptide conjugated to a fatty acid moiety; Z is O, C(O), NH, C₁ to C₃₀ alkyl, (OCH₂CH₂)ₘ, [C(O)NH—CH₂CH₂OCH₂]ₘ, an amino acid, a peptide, or a combination thereof, wherein m is an integer between 1-30; U is C₁ to C₅ alkyl, N, phenyl, or phenyl carbonyl, or a combination thereof; R¹ and R² are independently absent, a covalent bond, or C₁ to C₅ alkyl;
[0011] R³ and R⁴ are independently absent or an amide; R⁵ and R⁶ are independently absent or selected from the group consisting of C₁ to C₅ alkyl or phenyl, which is optionally substituted with one or more of NH₂, CH₂NH₂, and CH₂CH₂NH₂, CH₂O(CH₂CH₂O)ₙ, wherein n is an integer between 1-5; and R⁷ and R⁸ are independently absent or selected from the group consisting of:

[chemical structure]

wherein (*) is a connection point to R⁹ and R¹⁰ and (**) is the connection point to R⁵ or R⁶; and R⁹ and R¹⁰ are each an antibody or fragment thereof. In an embodiment, the therapeutic polypeptide comprises an agonist at one or more of the GIP, GLP-1 and glucagon receptors.

[0012] In a second aspect, the present disclosure provides a compound of the formula:

[chemical structure]

or a pharmaceutically acceptable salt thereof, wherein:
[0013] X_{TPP}, is a therapeutic polypeptide, comprising:

(SEQ ID NO: 1219)
YAibEGTX₆TSDX₁₀X₁₁X₁₂X₁₃LX₁₅X₁₆KAQX₂₀X₂₁FIX₂₄X₂₅LX₂₇
X₂₈X₂₉X₃₀X₃₁X₃₂X₃₃X₃₄X₃₅X₃₆X₃₇X₃₈X₃₉X₄₀X₄₁

[0014] wherein: X₆ is αMeF(2F), F, or αMeF; X₁₀ is 4-Pal, Y, or V; X₁₁ is Aib or S; X₁₂ is I or S, X₁₃ is L or αMeL; X₁₅ is D or E; X₁₆ is E or Orn; X₂₀ is Aib, αMeL, or Iva; X₂₁ is E, Q, D, or Orn; X₂₄ is K, Q, E, or D-Glu; X₂₅ is αMeY or Y; X₂₇ is I, L, or V; X₂₈ K, E or A; X₂₉ is Aib, G, or Q; X₃₀ is G or S; X₃₁ is P, G, E, or Orn; X₃₂ is absent, K, S, or P; wherein if X₃₂ is S or P, then X₃₃ is S; wherein if X₃₃ is S, then is X₃₄ is G or Aib; wherein if X₃₄ is G or Aib, then X₃₅ is absent, A, or Orn; wherein if X₃₅ is A or Orn, then X₃₆ is absent or P; wherein if X₃₆ is P, then X₃₇ is absent or P; wherein if X₃₇ is P, then X₃₈ is absent or P; wherein if X₃₈ is P, then X₃₉ is absent, S, Orn, or G; wherein if X₃₉ is S, Orn, or G, then X₄₀ is absent, K, or G; wherein if X₄₀ is K or G, then X₄₁ is absent, S, or G; wherein if X₃₂ absent or K, then X₃₃ through X₄₁ are also absent; wherein if X₃₅ is absent, then X₃₆ through X₄₁ are also absent; wherein if X₃₆ is absent, then X₃₇ through X₄₁ are also absent; wherein if X₃₇ is absent, then X₃₈ through X₄₁ are also absent; wherein if X₃₈ is absent, then X₃₉ through X₄₁ are also absent; wherein if X₃₉ is absent, then X₄₀ and X₄₁ are also absent; wherein if X₄₀ is absent, then X₄₁ is absent; L is a linker, conjugated to each of R⁹, R¹⁰, and X_{TPP}; and R⁹ and R¹⁰ are each an antibody or fragment thereof.

[0015] In an embodiment, the therapeutic polypeptide has dual agonist activity at the GIP and GLP-1 receptors.

[0016] In a third aspect, the present disclosure provides a compound of the formula:

[chemical structure]

or a pharmaceutically acceptable salt thereof, wherein:
[0017] X_{TPP}, is a therapeutic polypeptide, comprising:

(SEQ ID NO: 1220)
X₁X₂X₃X₄TX₆TSDX₁₀X₁₁X₁₂X₁₃LX₁₅X₁₆KAQX₂₀X₂₁FIX₂₄X₂₅LX₂₇X₂₈X₂₉
X₃₀X₃₁X₃₂X₃₃X₃₄X₃₅X₃₆X₃₇X₃₈X₃₉X₄₀X₄₁

[0018] wherein: X₁ is H, NMeY, or Y; X₂ is Ac4c, Aib, αMeS, Iva, or D-Ala; X₃ is Q. E, or H; X₄ is G or D-Ala; X₆ is αMeF(2F), F, or αMeF; X₁₀ is 4-Pal, Y, or V; X₁₁ is Aib, S, or αMeS; X₁₂ is I or S; X₁₃ is L or αMeL; X₁₅ is D or E; X₁₆ is E or Orn; X₂₀ is Aib, αMeL, Iva, or αMe4Pal; X₂₁ is E, Q, D, or Orn; X₂₄ is K, Q, E, D-Glu, or D-Gln; X₂₅ is αMeY or Y; X₂₇ is I, L, or V; X₂₈ K, E or A; X₂₉ is Aib, G, or Q, X₃₀ is G or S; X₃₁ is P, G, E, or Orn; X₃₂ is absent, S or P; wherein if X₃₂ is S or P, then X₃₃ is S; wherein if X₃₃ is S, then is X₃₄ is G or Aib; wherein if X₃₄ is G or Aib, then X₃₅ is absent or A or Orn; wherein if X₃₅ is A or Orn, then X₃₆ is absent or P; wherein if X₃₆ is P, then X₃₇ is absent or P; wherein if X₃₇ is P, then X₃₈ is absent or P; wherein if X₃₈ is P, then X₃₉ is absent or S, Orn, or G; wherein if X₃₉ is S, Orn, or G, then X₄₀ is absent, K, or G; wherein if X₄₀ is K or G, then X₄₁ is absent or S or G; wherein if X₃₂ is absent or K, then X₃₃ through X₄₁ are also absent; wherein if X₃₅ is absent, then X₃₆ through X₄₁ are also absent; wherein if X₃₆ is absent, then X₃₇ through X₄₁ are also absent; wherein if X₃₇ is absent, then X₃₈ through X₄₁ are also absent; wherein if X₃₈ is absent, then X₃₉ through X₄₁ are also absent; wherein if X₃₉ is absent, then X₄₀ and X₄₁ are also absent; wherein if X₄₀ is absent, then X₄₁ is absent; L is a linker, conjugated to each of R⁹, R¹⁰, and X_{TPP}; and R⁹ and R¹⁰ are an antibody or an antibody fragment thereof.

[0019] In an embodiment, the therapeutic polypeptide has triple agonist activity the GIP, GLP-1 and glucagon receptors.

[0020] In a fourth aspect, the present disclosure provides a pharmaceutical composition comprising a compound described herein, or a pharmaceutically acceptable salt thereof, and at least one pharmaceutically acceptable carrier, diluent, or excipient.

[0021] In a fifth aspect, the present disclosure provides a method of treating a disease or condition, the method comprising a step of administering to an individual in need thereof an effective amount of a compound described herein, or a pharmaceutically acceptable salt thereof.

### DESCRIPTION OF THE DRAWINGS

[0022] FIG. 1 shows the molecular structure for Compound 164 (SEQ ID NO:622).

[0023] FIG. 2 shows the molecular structure for Compound 1 (SEQ ID NO:459).

[0024] FIG. 3 shows the molecular structure for Compound 32 (SEQ ID NO:490).

[0025] FIG. 4 shows the molecular structure for Compound 47 (SEQ ID NO:505).

[0026] FIG. 5 shows the molecular structure for Compound 127 (SEQ ID NO:585).

[0027] FIG. 6 shows the molecular structure for Compound 129 (SEQ ID NO: 587).

[0028] FIG. 7 shows the molecular structure for Compound 136 (SEQ ID NO:594).

[0029] FIG. 8 shows the molecular structure for Compound 158 (SEQ ID NO:616).

[0030] FIG. 9 shows the molecular structure for Compound 168 (SEQ ID NO:626).

[0031] FIG. 10 shows the molecular structure for Compound 169 (SEQ ID NO:627).

[0032] FIG. 11 shows the molecular structure for Compound 170 (SEQ ID NO:628).

[0033] FIG. 12 shows the molecular structure for Compound 172 (SEQ ID NO:630).

[0034] FIG. 13 shows the molecular structure for Compound 173 (SEQ ID NO:631).

[0035] FIG. 14 shows the molecular structure for Compound 181 (SEQ ID NO:639).

[0036] FIG. 15 shows the molecular structure for Compound 183 (SEQ ID NO:641).

[0037] FIG. 16 shows the molecular structure for Compound 184 (SEQ ID NO:642).

[0038] FIG. 17 shows the molecular structure for Compound 185 (SEQ ID NO:643).

[0039] FIG. 18 shows the molecular structure for Compound 187 (SEQ ID NO:645).

[0040] FIG. 19 shows the molecular structure for Compound 188 (SEQ ID NO:646)

[0041] FIG. 20 shows the molecular structure for Compound 204 (SEQ ID NO:662).

[0042] FIG. 21 shows the molecular structure for Compound 479 (SEQ ID NO:1099).

[0043] FIG. 22 shows the molecular structure for Compound 480 (SEQ ID NO:698).

[0044] FIG. 23 shows the molecular structure for Compound 481 (SEQ ID NO:699).

[0045] FIG. 24 shows the molecular structure for Compound 482 (SEQ ID NO: 700).

[0046] FIG. 25 shows the molecular structure for Compound 336 (SEQ ID NO:792).

[0047] FIG. 26 shows the molecular structure for Compound 387 (SEQ ID NO:843).

[0048] FIG. 27 shows the molecular structure for Compound 403 (SEQ ID NO: 859).

[0049] FIG. 28 shows the molecular structure for Compound 413 (SEQ ID NO: 869).

[0050] FIG. 29 shows the molecular structure for Compound 433 (SEQ ID NO: 889).

[0051] FIG. 30 shows the molecular structure for Compound 435 (SEQ ID NO:891).

[0052] FIG. 31 shows the molecular structure for Compound 444 (SEQ ID NO:900).

[0053] FIG. 32 shows the molecular structure for Compound 483 (SEQ ID NO: 1100).

[0054] FIG. 33 shows the molecular structure for Compound 484 (SEQ ID NO: 1101).

[0055] FIG. 34 shows the molecular structure for Compound 485 (SEQ ID NO: 1102).

[0056] FIG. 35 shows the molecular structure for Compound 456 (SEQ ID NO:912).

[0057] FIG. 36 shows the molecular structure for Compound 486 (SEQ ID NO: 1103).

[0058] FIG. 37 shows the molecular structure for Compound 487 (SEQ ID NO: 1104).

[0059] FIG. 38 shows the molecular structure for Compound 459 (SEQ ID NO:915).

[0060] FIG. 39 shows the molecular structure for Compound 493 (SEQ ID NO:1110).

[0061] FIG. 40 shows the molecular structure for Compound 555 (SEQ ID NO: 1172).

[0062] FIG. 41 shows the molecular structure for Compound 556 (SEQ ID NO: 1173).

[0063] FIG. 42 shows the molecular structure for Compound 557 (SEQ ID NO: 1174).

[0064] FIG. 43 shows the molecular structure for Compound 558 (SEQ ID NO:1175).

[0065] FIG. 44 shows weekly administration of Compound 170 (SEQ ID NO:628) dose-dependently reduced body weight in diet-induced obese mice.

[0066] FIG. 45 shows weekly administration of Compound 172 (SEQ ID NO:630) dose-dependently reduced body weight in diet-induced obese mice.

[0067] FIG. 46 shows weekly administration of Compound 387 (SEQ ID NO:843) dose-dependently reduced body weight in diet-induced obese mice.

[0068] FIG. 47 shows weekly administration of Compound 456 (SEQ ID NO:912) dose-dependently reduced body weight in diet-induced obese mice.

### DETAILED DESCRIPTION

[0069] The present disclosure pertains to methods and compositions comprising therapeutic polypeptide Fc conjugates to facilitate the delivery of therapeutic polypeptides to patients. These conjugates comprise of a therapeutic polypeptide covalently linked to an antibody, or a fragment thereof, such as an Fc region, via a linker. Notably, the conjugation reaction between the therapeutic polypeptide, the disclosed linkers, and the antibody or fragment thereof occurs under relatively mild conditions, eliminating the need for protective measures during the reaction process.

[0070] Surprisingly, by attaching an acylated therapeutic polypeptide to an antibody or fragment thereof, such as an Fc region, with to a linker disclosed herein, the duration of action of the therapeutic polypeptide is improved and/or lengthened to a greater extent than would be expected through the use of either acylation or conjugation to an Fc region on their own. The attachment of the therapeutic polypeptide to the linker and Fc region may increase the duration of action of the therapeutic polypeptide by one or more of increasing the hydrodynamic size of the overall moiety, FcRn binding and/or recycling, and preventing the breakdown of the therapeutic polypeptide. The reaction conditions for the conjugation reaction between the linkers disclosed herein and antibodies or antibody fragments, such as Fc regions, are relatively mild, so the therapeutic polypeptides do not need to be modified to be protected during the reaction. Acylation of the therapeutic polypeptide may further increase the duration of action of the therapeutic polypeptide by one or more of promoting binding to serum albumin. The duration of action of the therapeutic polypeptide may be further increased in certain embodiments through the inclusion of structural features that improve the proteolytic stability of the therapeutic polypeptide.

### Therapeutic Polypeptide Fc Conjugates

[0071] The present disclosure provides multiple different embodiments of compounds comprising features resulting in increased duration of action.

[0072] In certain embodiments, the present disclosure provides a compound of Formula I:

[chemical structure]

or a pharmaceutically acceptable salt thereof, wherein:
[0073] a therapeutic polypeptide, X_{TPP}, is conjugated to a fatty acid moiety; Z is a linker; U is C₁ to C₅ alkyl, N, phenyl, or phenyl carbonyl, or a combination thereof; R¹ and R² are independently absent, a covalent bond, or C₁ to C₅ alkyl; R³ and R⁴ are independently absent or an amide; R⁵ and R⁶ are independently absent or selected from the group consisting of C₁ to C₅ alkyl or phenyl, which is optionally substituted with one or more of NH₂, CH₂NH₂, and CH₂CH₂NH₂, CH₂O(CH₂CH₂O)ₙ, wherein n is an integer between 1-5; and R⁷ and R⁸ are independently absent or selected from the group consisting of:

[chemical structure]

[0074] wherein (*) is a connection point to R⁹ or R¹⁰ and (**) is a connection point to R⁵ or R⁶; and R⁹ and R¹⁰ are each an antibody or fragment thereof.

[0075] In certain embodiments, Z comprises one or more of: O, C(O), NH, C₁ to C₃₀ alkyl, (OCH₂CH₂)ₘ, [C(O)NH—CH₂CH₂OCH₂]ₘ, (2-[2-(2-amino-ethoxy)-ethoxy]-acetyl)ₘ, an amino acid, a peptide, or a combination thereof, wherein m is an integer between 1-30.

[0076] In certain embodiments, R¹ and R² are the same. In certain embodiments, R³ and R⁴ are the same. In certain embodiments; R⁵ and R⁶ are the same. In certain embodiments, R⁷ and R⁸ are the same. In certain embodiments, R⁹ and R¹⁰ are Fc regions. In certain embodiments, R⁹ and R¹⁰ are the same.

[0077] In certain embodiments, the therapeutic polypeptide has agonist activity at one or more of the GIP, GLP-1 and/or glucagon receptors.

[0078] In some embodiments, the present disclosure provides a compound of Formula I, wherein R⁷ and R⁸ are:

[chemical structure]

[0079] In some embodiments, R⁵ and R⁶ are each a C₂ alkyl substituted with NH₂. In some embodiments, R³ and R⁴ are each an amide. In some embodiments, R⁵ and R⁶ are each a C₂ alkyl. In some embodiments, U is N or a phenyl.

[0080] In some embodiments, the present disclosure provides a compound of Formula I-A:

[chemical structure]

or a pharmaceutically acceptable salt thereof.

[0081] In some embodiments, the present disclosure provides a compound of Formula I, wherein R⁷ and R⁸ are:

[chemical structure]

[0082] In some embodiments, R⁵ and R⁶ are each a phenyl substituted with (OCH₂CH₂)ₘ, wherein m is 3. In some embodiments, R³ and R⁴ are each an amide. In some embodiments, R¹ and R² are each a C₂ alkyl. In some embodiments, U is N or a phenyl.

[0083] In some embodiments, the present disclosure provides a compound of Formula I-B:

[chemical structure]

or a pharmaceutically acceptable salt thereof.

[0084] In some embodiments the present disclosure provides a compound of Formula I, wherein R⁷ and R⁸ are:

[chemical structure]

[0085] In some embodiments, R⁵ and R⁶ are each a phenyl substituted with (OCH₂CH₂)ₘ, wherein m is 3. In some embodiments, R³ and R⁴ are each an amide. In some embodiments, R¹ and R² are each a C₂ alkyl. In some embodiments, U is N or a phenyl.

[0086] In some embodiments, the present disclosure provides a compound of Formula I-C:

[chemical structure]

or a pharmaceutically acceptable salt thereof.

[0087] In some embodiments of compounds of Formula I, R⁷ and R⁸ are each absent. In some embodiments, R⁵ and R⁶ are each C₁ alkyl. In some embodiments, R³ and R⁴ are each an amide. In some embodiments, R¹ and R² are each a C₂ alkyl. In some embodiments, U is N or a phenyl.

[0088] In some embodiments, the present disclosure provides a compound of Formula I-D:

[chemical structure]

or a pharmaceutically acceptable salt thereof.

[0089] In some embodiments, the present disclosure provides a compound of Formula I-E:

[chemical structure]

or a pharmaceutically acceptable salt thereof.

[0090] In certain embodiments, the present disclosure provides a compound of Formula II:

[chemical structure]

or a pharmaceutically acceptable salt thereof, wherein:
[0091] X_{TPP} is a therapeutic polypeptide L is a linker conjugated to the therapeutic polypeptide, R⁹, and R¹⁰; and R⁹ and R¹⁰ are each an antibody or antibody fragment thereof. In certain embodiments, R⁹ and R¹⁰ are each an Fc region.

[0092] In some embodiments, the therapeutic polypeptide has dual agonist activity at the GIP and GLP-1 receptors. In some embodiments, the therapeutic polypeptide has tri agonist activity at the GIP, GLP-1 and glucagon receptors.

[0093] In certain embodiments, the present disclosure provides a compound of Formula III:

[chemical structure]

or a pharmaceutically acceptable salt thereof, wherein:
[0094] Fc₁ and Fc₂ are absent or are each an Fc region; L is a linker; Z is a functional group of a small molecule, an amino acid polymer, or a combination thereof; X is a therapeutic polypeptide, wherein the therapeutic polypeptide is optionally conjugated to a fatty acid, Y.

[0095] In certain embodiments, the present disclosure provides a compound of Formula IV:

[chemical structure]

or a pharmaceutically acceptable salt thereof, wherein:
[0096] R¹ and R² are absent or independently selected from the group consisting of:

[chemical structure]

wherein:
[0097] (*) is a connection point to a sulfur atom in a cysteine residue of Fc₁ or Fc₂, and (**) is the connection point to R³ or R⁴; R³ and R⁴ are independently a C₁ to C₅ alkyl, which is optionally substituted with one or more of NH₂, CH₂NH₂, and CH₂CH₂NH₂; R⁵ and R⁶ are independently a covalent bond or C₁ to C₅ alkyl; U is a tertiary amine or 1,3,5-substituted phenyl; Z is O, NH, C₁ to C₃₀ alkyl, (OCH₂CH₂)ₘ, an amino acid polymer, or a combination thereof, wherein m is an integer between 1-30; X is a therapeutic polypeptide; Y is absent or a fatty acid; and Fc₁ and Fc₂ are independently an Fc region.

[0098] In some embodiments, the present disclosure provides a compound of Formula IV-A:

[chemical structure]

or a pharmaceutically acceptable salt thereof, wherein:
[0099] R³ and R⁴ are independently a C₁ to C₅ alkyl, which is optionally substituted with one or more of NH₂, CH₂NH₂, and CH₂CH₂NH₂; R⁵ and R⁶ are independently a covalent bond or C₁ to C₅ alkyl; U is a tertiary amine or 1,3,5-substituted phenyl; Z is an O, NH, C₁ to C₃₀ alkyl, (OCH₂CH₂)ₘ, an amino acid polymer, or a combination thereof, wherein m is an integer between 1-30; X is a therapeutic polypeptide; Y is absent or a fatty acid; and Fc₁ and Fc₂ are independently an Fc region.

[0100] In another embodiment, the present disclosure provides a compound of Formula IV-A comprising:

[chemical structure]

or a pharmaceutically acceptable salt thereof, wherein:
[0101] R₃ and R₄ are independently a C₁ to C₅ alkyl, which is optionally substituted with one or more of NH₂, CH₂NH₂, and CH₂CH₂NH₂; R⁵ and R⁶ are independently a covalent bond or C₁ to C₅ alkyl; Z is an O, NH, C₁ to C₃₀ alkyl, (OCH₂CH₂)ₘ, an amino acid polymer, or a combination thereof, wherein m is an integer between 1-30, X is a therapeutic polypeptide; Y is absent or a fatty acid; and Fc₁ and Fc₂ are independently an Fc region.

[0102] In yet another embodiment, the present disclosure provides a compound of Formula IV-A comprising:

[chemical structure]

or a pharmaceutically acceptable salt thereof, wherein:
[0103] R₃ and R₄ are independently a C₁ to C₅ alkyl, which is optionally substituted with one or more of NH₂, CH₂NH₂, and CH₂CH₂NH₂; Z is an O, NH, C₁ to C₃₀ alkyl, (OCH₂CH₂)ₘ, an amino acid polymer, or a combination thereof, wherein m is an integer between 1-30, X is a therapeutic polypeptide; Y is absent or a fatty acid; and Fc₁ and Fc₂ are independently an Fc region.

[0104] In some embodiments, the present disclosure provides a compound of Formula IV-B:

[chemical structure]

or a pharmaceutically acceptable salt thereof, wherein:
[0105] R³ and R⁴ are independently a C₁ to C₅ alkyl, which is optionally substituted with one or more of NH₂, CH₂NH₂, and CH₂CH₂NH₂; R⁵ and R⁶ are independently a covalent bond or C₁ to C₅ alkyl; U is a tertiary amine or 1,3,5-substituted phenyl; Z is an O, NH, C₁ to C₃₀ alkyl, (OCH₂CH₂)ₘ, an amino acid polymer, or a combination thereof, wherein m is an integer between 1-30; X is a therapeutic polypeptide; Y is absent or a fatty acid; and Fc₁ and Fc₂ are independently an Fc region.

[0106] In another embodiment, the present disclosure provides a compound of Formula IV-B comprising:

[chemical structure]

or a pharmaceutically acceptable salt thereof, wherein:
[0107] R³ and R⁴ are independently a C₁ to C₅ alkyl, which is optionally substituted with one or more of NH₂, CH₂NH₂, and CH₂CH₂NH₂; R⁵ and R⁶ are independently a covalent bond or C₁ to C₅ alkyl; Z is an O, NH, C₁ to C₃₀ alkyl, (OCH₂CH₂)ₘ, an amino acid polymer, or a combination thereof, wherein m is an integer between 1-30; X is a therapeutic polypeptide; Y is absent or a fatty acid; and Fc₁ and Fc₂ are independently an Fc region.

[0108] In yet another embodiment, the present disclosure provides a compound of Formula IV-B comprising:

[chemical structure]

or a pharmaceutically acceptable salt thereof, wherein:
[0109] R³ and R⁴ are independently a C₁ to C₅ alkyl, which is optionally substituted with one or more of NH₂, CH₂NH₂, and CH₂CH₂NH₂; Z is an O, NH, C₁ to C₃₀ alkyl, (OCH₂CH₂)ₘ, an amino acid polymer, or a combination thereof, wherein m is an integer between 1-30; X is a therapeutic polypeptide; Y is absent or a fatty acid; and Fc₁ and Fc₂ are independently an Fc region.

[0110] In some embodiments, the present disclosure provides a compound of Formula IV-C:

[chemical structure]

or a pharmaceutically acceptable salt thereof, wherein:
[0111] R³ and R⁴ are independently a C₁ to C₅ alkyl, which is optionally substituted with one or more of NH₂, CH₂NH₂, and CH₂CH₂NH₂; R⁵ and R⁶ are independently a covalent bond or C₁ to C₅ alkyl; U is a tertiary amine or 1,3,5-substituted phenyl; Z is an O, NH, C₁ to C₃₀ alkyl, (OCH₂CH₂)ₘ, an amino acid polymer, or a combination thereof, wherein m is an integer between 1-30; X is a therapeutic polypeptide; Y is absent or a fatty acid; and Fc₁ and Fc₂ are independently an Fc region.

[0112] In another embodiment, the present disclosure provides a compound of Formula IV-C comprising:

[chemical structure]

or a pharmaceutically acceptable salt thereof, wherein:
[0113] R³ and R⁴ are independently a C₁ to C₅ alkyl, which is optionally substituted with one or more of NH₂, CH₂NH₂, and CH₂CH₂NH₂; R⁵ and R⁶ are independently a covalent bond or C₁ to C₅ alkyl; Z is an O, NH, C₁ to C₃₀ alkyl, (OCH₂CH₂)ₘ, an amino acid polymer, or a combination thereof, wherein m is an integer between 1-30; X is a therapeutic polypeptide; Y is absent or a fatty acid; and Fc₁ and Fc₂ are independently an Fc region.

[0114] In yet another embodiment, the present disclosure provides a compound of Formula IV-C comprising:

[chemical structure]

or a pharmaceutically acceptable salt thereof, wherein:
[0115] R³ and R⁴ are independently a C₁ to C₅ alkyl, which is optionally substituted with one or more of NH₂, CH₂NH₂, and CH₂CH₂NH₂; Z is an O, NH, C₁ to C₃₀ alkyl, (OCH₂CH₂)ₘ, an amino acid polymer, or a combination thereof, wherein m is an integer between 1-30; X is a therapeutic polypeptide; Y is absent or a fatty acid; and Fc₁ and Fc₂ are independently an Fc region.

[0116] In some embodiments, the present disclosure provides a compound of Formula IV-D:

[chemical structure]

or a pharmaceutically acceptable salt thereof, wherein:
[0117] R³ and R⁴ are independently a C₁ to C₅ alkyl, which is optionally substituted with one or more of NH₂, CH₂NH₂, and CH₂CH₂NH₂; R⁵ and R⁶ are independently a covalent bond or C₁ to C₅ alkyl; U is a tertiary amine or 1,3,5-substituted phenyl; Z is an O, NH, C₁ to C₃₀ alkyl, (OCH₂CH₂)ₘ, an amino acid polymer, or a combination thereof, wherein m is an integer between 1-30; X is a therapeutic polypeptide; Y is absent or a fatty acid; and Fc₁ and Fc₂ are independently an Fc region.

[0118] In another embodiment, the present disclosure provides a compound of Formula IV-D comprising:

[chemical structure]

or a pharmaceutically acceptable salt thereof, wherein:
[0119] R³ and R⁴ are independently a C₁ to C₅ alkyl, which is optionally substituted with one or more of NH₂, CH₂NH₂, and CH₂CH₂NH₂; R⁵ and R⁶ are independently a covalent bond or C₁ to C₅ alkyl; Z is an O, NH, C₁ to C₃₀ alkyl, (OCH₂CH₂)ₘ, an amino acid polymer, or a combination thereof, wherein m is an integer between 1-30; X is a therapeutic polypeptide; Y is absent or a fatty acid; and Fc₁ and Fc₂ are independently an Fc region.

[0120] In yet another embodiment, the present disclosure provides a compound of Formula IV-D comprising:

[chemical structure]

or a pharmaceutically acceptable salt thereof, wherein:
[0121] R³ and R⁴ are independently a C₁ to C₅ alkyl, which is optionally substituted with one or more of NH₂, CH₂NH₂, and CH₂CH₂NH₂; Z is an O, NH, C₁ to C₃₀ alkyl, (OCH₂CH₂)ₘ, an amino acid polymer, or a combination thereof, wherein m is an integer between 1-30; X is a therapeutic polypeptide; Y is absent or a fatty acid; and Fc₁ and Fc₂ are independently an Fc region.

### Intermediate Therapeutic Polypeptide Conjugates

[0122] The present disclosure provides intermediate compounds comprising therapeutic polypeptides conjugated to linkers for subsequent conjugation to an antibody or fragment thereof, e.g., an Fc region. Non-limiting examples of such intermediate compounds are provided below.

### Maleimide Intermediate Compounds

[0123] In some embodiments, the present disclosure provides maleimide intermediate compounds of Formula IV-A comprising:

[chemical structure]

or a pharmaceutically acceptable salt thereof, wherein: R³ and R⁴ are independently a C₁ to C₅ alkyl, which is optionally substituted with one or more of NH₂, CH₂NH₂, and CH₂CH₂NH₂; R⁵ and R⁶ are independently a covalent bond or C₁ to C₅ alkyl; U is a tertiary amine or 1,3,5-substituted phenyl; Z is an O, NH, C₁ to C₃₀ alkyl, (OCH₂CH₂)ₘ, an amino acid polymer, or a combination thereof, wherein m is an integer between 1-30; X is a therapeutic polypeptide; and Y is absent or a fatty acid.

[0124] In another embodiment, the present disclosure provides maleimide intermediate compounds of Formula IV-A comprising:

[chemical structure]

or pharmaceutically acceptable salts thereof, wherein: R³ and R⁴ are independently a C₁ to C₅ alkyl, which is optionally substituted with one or more of NH₂, CH₂NH₂, and CH₂CH₂NH₂; R⁵ and R⁶ are independently a covalent bond or C₁ to C₅ alkyl; Z is an O, NH, C₁ to C₃₀ alkyl, (OCH₂CH₂)ₘ, an amino acid polymer, or a combination thereof, wherein m is an integer between 1-30; X is a therapeutic polypeptide; and Y is absent or a fatty acid.

[0125] In yet another embodiment, the present disclosure provides maleimide intermediate compounds of Formula IV-A comprising:

[chemical structure]

or pharmaceutically acceptable salts thereof, wherein: R³ and R⁴ are independently a C₁ to C₅ alkyl, which is optionally substituted with one or more of NH₂, CH₂NH₂, and CH₂CH₂NH₂; Z is an O, NH, C₁ to C₃₀ alkyl, (OCH₂CH₂)ₘ, an amino acid polymer, or a combination thereof, wherein m is an integer between 1-30, X is a therapeutic polypeptide; and Y is absent or a fatty acid.

[chemical structure]

[0126] Also disclosed herein are compounds or pharmaceutically acceptable salts thereof of the structure shown above, wherein: R³ and R⁴ are independently a C₁ to C₅ alkyl, which is optionally substituted with one or more of NH₂, CH₂NH₂, and CH₂CH₂NH₂; R⁵ and R⁶ are independently a covalent bond or C₁ to C₅ alkyl; U is a tertiary amine or 1,3,5-substituted phenyl; Z is an O, NH, C₁ to C₃₀ alkyl, (OCH₂CH₂)ₘ, an amino acid polymer, or a combination thereof, wherein m is an integer between 1-30; X is a therapeutic polypeptide, Y is absent or a fatty acid; and D₁ and D₂ independently comprise an amide, amine, imine, sulfonamide, thiourea, urea, thioether, or combinations thereof.

[chemical structure]

[0127] Also disclosed herein are compounds or pharmaceutically acceptable salts thereof of the structure shown above, wherein: R³ and R⁴ are independently a C₁ to C₅ alkyl, which is optionally substituted with one or more of NH₂, CH₂NH₂, and CH₂CH₂NH₂; R⁵ and R⁶ are independently a covalent bond or C₁ to C₅ alkyl; U is a tertiary amine or 1,3,5-substituted phenyl; Z is an O, NH, C₁ to C₃₀ alkyl, (OCH₂CH₂)ₘ, an amino acid polymer, or a combination thereof, wherein m is an integer between 1-30; X is a therapeutic polypeptide; and Y is absent or a fatty acid.

[chemical structure]

[0128] Also disclosed herein are compounds or pharmaceutically acceptable salts thereof of the structure shown above, wherein: R³ and R⁴ are independently a C₁ to C₅ alkyl, which is optionally substituted with one or more of NH₂, CH₂NH₂, and CH₂CH₂NH₂; R⁵ and R⁶ are independently a covalent bond or C₁ to C₅ alkyl; Z is an O, NH, C₁ to C₃₀ alkyl, (OCH₂CH₂)ₘ, an amino acid polymer, or a combination thereof, wherein m is an integer between 1-30; X is a therapeutic polypeptide; and Y is absent or a fatty acid.

[chemical structure]

[0129] Also disclosed herein are compounds or pharmaceutically acceptable salts thereof of the structure shown above, wherein: R³ and R⁴ are independently a C₁ to C₅ alkyl, which is optionally substituted with one or more of NH₂, CH₂NH₂, and CH₂CH₂NH₂; Z is an O, NH, C₁ to C₃₀ alkyl, (OCH₂CH₂)ₘ, an amino acid polymer, or a combination thereof, wherein m is an integer between 1-30; X is a therapeutic polypeptide; and Y is absent or a fatty acid.

### Tetrazole Intermediate Compounds

[0130] In some embodiments, the present disclosure provides tetrazole intermediate compounds of Formula IV-B comprising:

[chemical structure]

or pharmaceutically acceptable salts thereof, wherein: R³ and R⁴ are independently a C₁ to C₅ alkyl, which is optionally substituted with one or more of NH₂, CH₂NH₂, and CH₂CH₂NH₂; R⁵ and R⁶ are independently a covalent bond or C₁ to C₅ alkyl; U is a tertiary amine or 1,3,5-substituted phenyl; Z is an O, NH, C₁ to C₃₀ alkyl, (OCH₂CH₂)ₘ, an amino acid polymer, or a combination thereof, wherein m is an integer between 1-30; X is a therapeutic polypeptide; and Y is absent or a fatty acid.

[0131] In another embodiment, the present disclosure provides tetrazole intermediate compounds of Formula IV-B comprising:

[chemical structure]

or pharmaceutically acceptable salts thereof, wherein: R³ and R⁴ are independently a C₁ to C₅ alkyl, which is optionally substituted with one or more of NH₂, CH₂NH₂, and CH₂CH₂NH₂; R⁵ and R⁶ are independently a covalent bond or C₁ to C₅ alkyl; Z is an O, NH, C₁ to C₃₀ alkyl, (OCH₂CH₂)ₘ, an amino acid polymer, or a combination thereof, wherein m is an integer between 1-30; X is a therapeutic polypeptide; and Y is absent or a fatty acid.

[0132] In yet another embodiment, the present disclosure provides tetrazole intermediate compounds of Formula IV-B comprising:

[chemical structure]

or pharmaceutically acceptable salts thereof, wherein: R³ and R⁴ are independently a C₁ to C₅ alkyl, which is optionally substituted with one or more of NH₂, CH₂NH₂, and CH₂CH₂NH₂; Z is an O, NH, C₁ to C₃₀ alkyl, (OCH₂CH₂)ₘ, an amino acid polymer, or a combination thereof, wherein m is an integer between 1-30; X is a therapeutic polypeptide; and Y is absent or a fatty acid.

[chemical structure]

[0133] Also disclosed herein are compounds or pharmaceutically acceptable salts thereof of the structure shown above, wherein: R³ and R⁴ are independently a C₁ to C₅ alkyl, which is optionally substituted with one or more of NH₂, CH₂NH₂, and CH₂CH₂NH₂; R⁵ and R⁶ are independently a covalent bond or C₁ to C₅ alkyl; U is a tertiary amine or 1,3,5-substituted phenyl; Z is an O, NH, C₁ to C₃₀ alkyl, (OCH₂CH₂)ₘ, an amino acid polymer, or a combination thereof, wherein m is an integer between 1-30; X is a therapeutic polypeptide, Y is absent or a fatty acid; and D₁ and D₂ independently comprise an amide, amine, imine, sulfonamide, thiourea, urea, thioether, or combinations thereof.

[chemical structure]

[0134] Also disclosed herein are compounds or pharmaceutically acceptable salts thereof of the structure shown above, wherein: R³ and R⁴ are independently a C₁ to C₅ alkyl, which is optionally substituted with one or more of NH₂, CH₂NH₂, and CH₂CH₂NH₂; R⁵ and R⁶ are independently a covalent bond or C₁ to C₅ alkyl; U is a tertiary amine or 1,3,5-substituted phenyl; Z is an O, NH, C₁ to C₃₀ alkyl, (OCH₂CH₂)ₘ, an amino acid polymer, or a combination thereof, wherein m is an integer between 1-30; X is a therapeutic polypeptide; and Y is absent or a fatty acid.

[chemical structure]

[0135] Also disclosed herein are compounds or pharmaceutically acceptable salts thereof of the structure shown above, wherein: R³ and R⁴ are independently a C₁ to C₅ alkyl, which is optionally substituted with one or more of NH₂, CH₂NH₂, and CH₂CH₂NH₂; R⁵ and R⁶ are independently a covalent bond or C₁ to C₅ alkyl; Z is an O, NH, C₁ to C₃₀ alkyl, (OCH₂CH₂)ₘ, an amino acid polymer, or a combination thereof, wherein m is an integer between 1-30; X is a therapeutic polypeptide; and Y is absent or a fatty acid.

[chemical structure]

[0136] Also disclosed herein are compounds or pharmaceutically acceptable salts thereof of the structure shown above, wherein: R³ and R⁴ are independently a C₁ to C₅ alkyl, which is optionally substituted with one or more of NH₂, CH₂NH₂, and CH₂CH₂NH₂; Z is an O, NH, C₁ to C₃₀ alkyl, (OCH₂CH₂)ₘ, an amino acid polymer, or a combination thereof, wherein m is an integer between 1-30; X is a therapeutic polypeptide; and Y is absent or a fatty acid.

### Oxidiazole Intermediate Compounds

[0137] In some embodiments, the present disclosure provides tetrazole intermediate compounds of Formula IV-C comprising:

[chemical structure]

or pharmaceutically acceptable salts thereof, wherein: R³ and R⁴ are independently a C₁ to C₅ alkyl, which is optionally substituted with one or more of NH₂, CH₂NH₂, and CH₂CH₂NH₂; R⁵ and R⁶ are independently a covalent bond or C₁ to C₅ alkyl; U is a tertiary amine or 1,3,5-substituted phenyl; Z is an O, NH, C₁ to C₃₀ alkyl, (OCH₂CH₂)ₘ, an amino acid polymer, or a combination thereof, wherein m is an integer between 1-30; X is a therapeutic polypeptide; and Y is absent or a fatty acid.

[0138] In another embodiment, the present disclosure provides tetrazole intermediate compounds of Formula IV-C comprising:

[chemical structure]

or pharmaceutically acceptable salts thereof, wherein: R³ and R⁴ are independently a C₁ to C₅ alkyl, which is optionally substituted with one or more of NH₂, CH₂NH₂, and CH₂CH₂NH₂; R⁵ and R⁶ are independently a covalent bond or C₁ to C₅ alkyl; Z is an O, NH, C₁ to C₃₀ alkyl, (OCH₂CH₂)ₘ, an amino acid polymer, or a combination thereof, wherein m is an integer between 1-30; X is a therapeutic polypeptide; and Y is absent or a fatty acid.

[0139] In yet another embodiment, the present disclosure provides tetrazole intermediate compounds of Formula IV-C comprising:

[chemical structure]

or pharmaceutically acceptable salts thereof, wherein: R³ and R⁴ are independently a C₁ to C₅ alkyl, which is optionally substituted with one or more of NH₂, CH₂NH₂, and CH₂CH₂NH₂; Z is an O, NH, C₁ to C₃₀ alkyl, (OCH₂CH₂)ₘ, an amino acid polymer, or a combination thereof, wherein m is an integer between 1-30; X is a therapeutic polypeptide; and Y is absent or a fatty acid.

[chemical structure]

[0140] Also disclosed herein are compounds or pharmaceutically acceptable salts thereof of the structure shown above, wherein: R³ and R⁴ are independently a C₁ to C₅ alkyl, which is optionally substituted with one or more of NH₂, CH₂NH₂, and CH₂CH₂NH₂; R⁵ and R⁶ are independently a covalent bond or C₁ to C₅ alkyl; U is a tertiary amine or 1,3,5-substituted phenyl; Z is an O, NH, C₁ to C₃₀ alkyl, (OCH₂CH₂)ₘ, an amino acid polymer, or a combination thereof, wherein m is an integer between 1-30; X is a therapeutic polypeptide, Y is absent or a fatty acid; and D₁ and D₂ independently comprise an amide, amine, imine, sulfonamide, thiourea, urea, thioether, or combinations thereof.

[chemical structure]

[0141] Also disclosed herein are compounds or pharmaceutically acceptable salts thereof of the structure shown above, wherein: R³ and R⁴ are independently a C₁ to C₅ alkyl, which is optionally substituted with one or more of NH₂, CH₂NH₂, and CH₂CH₂NH₂; R⁵ and R⁶ are independently a covalent bond or C₁ to C₅ alkyl; U is a tertiary amine or 1,3,5-substituted phenyl; Z is an O, NH, C₁ to C₃₀ alkyl, (OCH₂CH₂)ₘ, an amino acid polymer, or a combination thereof, wherein m is an integer between 1-30; X is a therapeutic polypeptide; and Y is absent or a fatty acid.

[chemical structure]

[0142] Also disclosed herein are compounds or pharmaceutically acceptable salts thereof of the structure shown above, wherein: R³ and R⁴ are independently a C₁ to C₅ alkyl, which is optionally substituted with one or more of NH₂, CH₂NH₂, and CH₂CH₂NH₂; R⁵ and R⁶ are independently a covalent bond or C₁ to C₅ alkyl; Z is an O, NH, C₁ to C₃₀ alkyl, (OCH₂CH₂)ₘ, an amino acid polymer, or a combination thereof, wherein m is an integer between 1-30; X is a therapeutic polypeptide; and Y is absent or a fatty acid.

[chemical structure]

[0143] Also disclosed herein are compounds or pharmaceutically acceptable salts thereof of the structure shown above, wherein: R³ and R⁴ are independently a C₁ to C₅ alkyl, which is optionally substituted with one or more of NH₂, CH₂NH₂, and CH₂CH₂NH₂; Z is an O, NH, C₁ to C₃₀ alkyl, (OCH₂CH₂)ₘ, an amino acid polymer, or a combination thereof, wherein m is an integer between 1-30; X is a therapeutic polypeptide; and Y is absent or a fatty acid.

[0144] In some embodiments described herein wherein the therapeutic polypeptide is conjugated to Z, Z comprises one or more of: O, C(O), NH, C1 to C30 alkyl, (OCH₂CH₂)ₘ, [C(O)NH—CH₂CH2OCH₂]ₘ, (2-[2-(2-amino-ethoxy)-ethoxy]-acetyl)ₘ, an amino acid, a peptide, or a combination thereof, wherein m is an integer between 1-30. In some embodiments, Z comprises a peptide comprising the sequence of one or more of:

| Peptide | SEQ ID NO: |
|---|---|
| GGGGSGGGGSGGGGS | 1182 |
| GGGGS | 1183 |
| GPAPAPAPAPAPA | 1184 |
| GPAPAPAPAPAPAPAPA | 1185 |
| GKAAAEKAAAEKAAAE | 1186 |
| LEAEAAAKEAAAKEAAAKEAAAKALE | 1187 |
| GGGGSGGGGSGGGGSGGGGS | 1188 |
| GGGGSGGGGSGGGGSGGGGSGGGGS | 1189 |
| PGGGGSGGGGSGGGGS | 1190 |
| SPGGGGSGGGGSGGGGS | 1191 |
| GGGGSGAPAPAPAPAPAP | 1192 |
| GGGGSGGGGSGAPAPAPAPAPAP | 1193 |
| GGGGSGEAAAKEAAAKEAAAK | 1194 |
| GGGGSGGGGSGEAAAKEAAAKEAAAK | 1195 |
| GGGGSGAPAPAPAP | 1196 |
| GGGGSGGGGSGGGGSGAPAPAP | 1197 |
| GGGGSGGGGSGGGGSGGGGSGAPAPAP | 1198 |
| GGGGSGGGGSEAAAKEAAAKEAAAKEAAAK | 1199 |
| GGGGSGGGGSGGGGSGEAAAKEAAAKEAAAK | 1200 |
| GGGGSGGGGSGGGGSGGGGSGEAAAKEAAAKEAAAK | 1201 |
| GGGGSGGGGSGAPAPAPAPAPAPAPAP | 1202 |
| GGGGSGGGGSGGGGSGAPAPAPAPAPAP | 1203 |
| GGGGSGGGGSGGGGSGGGGSGAPAPAPAPAPAP | 1204 |
| GGGGQGGGGQGGGGQ | 1205 |
| GGGGQGGGGQGGGGQGGGGQ | 1206 |
| GGGGQGGGGQGGGGQGGGGQGGGGQ | 1207 |
| GGGGSGGGGSGGGGSGGGGSG | 1208 |
| SGGGGSGGGGSGGGGGPAPAPAPAPAPAG | 1209 |
| SGGGGSGGGGSGGGGGKAAAEKAAAEKAAAEG | 1210 |
| APAPAPAPAPAPGGGGSGGGGS | 1211 |
| GGGGSGGGGSGGGGSGEPEPEPEPEPEP | 1212 |
| GGGGSGEPEPEPEPEPEP | 1213 |
| GGGGQGGGGQGGGGQGEPEPEPEPEPEP | 1214 |
| GPEPEPEPEPEPE | 1215 |
| GPKPKPKPKPKPK | 1216 |
| GEPEPEPEPEPEP | 1217 |

### Linkers

[0145] In some embodiments, Formula II comprises a linker, L, to connect a therapeutic polypeptide to an antibody or fragments thereof, such as an Fc region. In certain embodiments, the L of Formula II comprises:

[chemical structure]

wherein (***) comprises a connection point to the therapeutic polypeptide and (*) comprises a connection point to R⁹ or R¹⁰.

[0146] In some other embodiments, the L of Formula II comprises:

[chemical structure]

wherein (***) comprises a connection point to the therapeutic polypeptide and (*) comprises a connection point to R⁹ or R¹⁰.

[0147] In some embodiments, the present disclosure includes a linker, L, which connects Z via a nucleophilic conjugate addition reaction to another moiety. In some embodiments, the moiety is one or more cysteine amino acids in an Fc region of an antibody or fragment thereof. In some embodiments, the moiety is a sulfur atom from a cysteine residue in an Fc region. In some embodiments, Z via a nucleophilic conjugate addition reaction to another nucleophile, such as an amide, amine, imine, sulfonamide, thiourea, urea, thioether, thiol, cysteine, or combinations thereof, as shown in some of the reactions depicted and described below.

[0148] In some embodiments, the linker may include a central trivalent linking unit, U, as shown in Formula IV-A, IV-B, and IV-C above. In some embodiments, a portion of U may be attached to Z. In some embodiments, the other two portions of U comprise a maleimide functional group, e.g., an electrophile, which can be used to selectively connect Z to two nucleophiles in a nucleophilic conjugate addition reaction.

[0149] As such, the linker of the present invention comprises two or more maleimide functional groups, preferably two maleimide functional groups, prior to the nucleophilic conjugate addition reaction. Alternatively, the linker of the present invention comprises two or more methyl sulfonyl tetrazole functional groups, or preferably two methyl sulfonyl tetrazole functional groups, prior to the aromatic nucleophilic substitution reaction. Alternatively, the linker of the present invention comprises two or more methyl sulfonyl oxadiazole functional groups, or preferably two methyl sulfonyl oxadiazole functional groups, prior to the aromatic nucleophilic substitution reaction. Alternatively, the linker of the present invention comprises two or more bromo acetyl functional groups, or preferably two bromo acetyl functional groups, prior to the nucleophilic substitution reaction.

[0150] Suitable trivalent linking units may include any atom or molecules that can be tri-substituted, such as tri-substituted C₅ to C₈ aryl, tri-substituted C₅ to C₈ heteroaryl with 1 to 3 heteroatoms in the ring system, tri-substituted C₁ to C₅ cycloalkyl, tri-substituted C₅ to C₈ heterocycle with 1 to 3 heteroatoms in the ring system, tertiary amine, tertiary phosphine, or combinations thereof. Preferably, U is a 1,3,5-trisubstituted phenyl or tertiary amine.

[0151] In some embodiments, the structures that are attached to U are represented below:

[chemical structure]

[0152] In these structures above, R₃ can be C₁ to C₅ alkyl, optionally substituted with one or more of —NH₂, —CH₂NH₂, and —CH₂CH₂NH₂; and R₅ can be C₁ to C₅ alkyl or absent. R₄ can be C₁ to C₅ alkyl, optionally substituted with one or more of —NH₂, —CH₂NH₂, and —CH₂CH₂NH₂; and R⁶ can be C₁ to C₅ alkyl or absent.

[0153] R₃ and/or R₄ can preferably be C₂ alkyl, optionally substituted with one or more of —NH₂, —CH₂NH₂, or —CH₂CH₂NH₂. R₅ and/or R₆ can preferably be C₂ alkyl when U is a tertiary amine and absent when U is 1,3,5-trisubstituted phenyl.

[0154] When both structure above are attached to U, R₃ and R₄ can be identical, or they can be independently C₁ to C₅ alkyl, optionally substituted with one or more of —NH₂, —CH₂NH₂, and —CH₂CH₂NH₂. When both structures above are attached to U, R₅ and R₆ can be identical, or they can be independently C₁ to C₅ alkyl or absent. When R₅ and/or R₆ are absent, the amide nitrogen in the structure is directly connected to U, such as when U is 1,3,5-trisubstituted phenyl.

[0155] The third arm of the trivalent linking unit attached to U may include Z. Z comprises O, NH, C₁ to C₃₀ alkyl, (OCH₂CH₂)ₘ, an amino acid polymer, or a combination thereof, wherein m is an integer between 1-30; X is a therapeutic polypeptide; Y is absent or a fatty acid; and Fc₁ and Fc₂ are independently an Fc region. Z may be connected directly to U or to a carbonyl functional group. For example, the carbon atom of the carbonyl functional group can be directly attached to U and Z.

[0156] Alternatively, each arm that is attached to U and the tetrazole functional group can be represented by the structure below:

[chemical structure]

[0157] Alternatively, each arm that is attached to U and the oxadiazole functional group can be represented by the formula below:

[chemical structure]

[0158] In one embodiment, the first of the two arms, represented by the structures above, R₃ can be phenyl-(OCH₂CH₂)ₘOCH₂ and R₅ can be C₁ to C₅ alkyl or absent. In another embodiment, the second of the two arms, represented by the structures above, R₄ can be phenyl-(OCH₂CH₂)ₘOCH₂ and R₆ can be C₁ to C₅ alkyl or absent.

[0159] R₃ and/or R₄ can preferably be phenyl-(OCH₂CH₂)₂OCH₂. R₅ and/or R₆ can preferably be C₂ alkyl when U is a tertiary amine and absent when U is 1,3,5-trisubstituted phenyl.

[0160] When both arms are attached to U, R₃ and R₄ can be identical, or they can be independently phenyl-(OCH₂CH₂)₂OCH₂. When both arms are attached to U, R₅ and R₆ can be identical, or they can be independently C₁ to C₅ alkyl or absent. When R₅ and/or R₆ are absent, the amide nitrogen in the structures above is directly connected to U, such as when U is 1,3,5-trisubstituted phenyl.

[0161] The third of the three arms attached to U includes Z. Z may comprise H, OH, NH₂, NH, a therapeutic, C₁ to C₃₀ alkyl, (OCH₂CH₂)ₘ, or combinations thereof, and wherein m is a whole number integer from 1 to 30. Z can be connected directly to U or Z can be connected to a carbonyl functional group. The carbon atom of the carbonyl functional group can be directly attached to U and Z.

[0162] Alternatively, each arm that is attached to U and the acetyl functional group can be represented by the structures below:

[chemical structure]

[0163] In one embodiment, the first of the two arms, represented by the structures above, R₃ can be C₁ to C₅ alkyl and R₅ can be C₁ to C₅ alkyl or absent. In another embodiments, the second of the two arms, represented by the structures above, R₄ can be C₁ to C₅ alkyl and R₆ can be C₁ to C₅ alkyl or absent.

[0164] R₃ and/or R₄ can preferably be C₂ alkyl. R₅ and/or R₆ can preferably be C₂ alkyl when U is a tertiary amine and absent when U is 1,3,5-trisubstituted phenyl.

[0165] When both arms are attached to U, R₃ and R₄ can be identical, or they can be independently C₁ to C₅ alkyl. When both arms are attached to U, R⁵ and R⁶ can be identical, or they can be independently C₁ to C₅ alkyl or absent. When R₅ and/or R₆ are absent, the amide nitrogen in Formula V-B or Formula V-C is directly connected to U, such as when U is 1,3,5-trisubstituted phenyl.

[0166] The third of the three arms attached to U includes Z. Z can comprise H, OH, NH₂, NH, a therapeutic, C₁ to C₃₀ alkyl, (OCH₂CH₂)ₘ, or combinations thereof, and wherein m is a whole number integer from 1 to 30. Z can be connected directly to U or Z can be connected to a carbonyl functional group. The carbon atom of the carbonyl functional group can be directly attached to U and Z, as shown in Formula II-IV.

[0167] Since the reaction conditions for conjugation are relatively mild, the payload, i.e., therapeutic, does not need to be modified to be protected during the reaction. Other linkers disclosed in the art require that therapeutic polypeptide, e.g., insulin, be modified with a recombinant extension. The conjugated compounds disclosed herein are efficacious with a longer duration of action and without the need to modify the therapeutic polypeptide.

[chemical structure]

[0168] In some embodiments disclosed herein, are compounds of the structure above, and pharmaceutically acceptable salts thereof, wherein R₃ and R₄ are independently selected from C₁ to C₅ alkyl; R₅ and R₆ are independently C₁ to C₅ alkyl or absent; U is tertiary amine or 1,3,5-substituted phenyl; Z comprises O, NH, C₁ to C₃₀ alkyl, (OCH₂CH₂)ₘ, an amino acid polymer, or a combination thereof, X comprises a therapeutic polypeptide; and Y comprises a fatty acid; and wherein: m is an integer between 1-30; and Fc₁ and Fc₂ each comprise an Fc region.

[chemical structure]

[0169] In some embodiments disclosed herein, are compounds of the structure above or pharmaceutically acceptable salts thereof, wherein R₃ and R₄ are independently selected from C₁ to C₅ alkyl; R₅ and R₆ are independently C₁ to C₅ alkyl; Z comprises O, NH, C₁ to C₃₀ alkyl, (OCH₂CH₂)ₘ, an amino acid polymer, or a combination thereof, X comprises a therapeutic polypeptide; and Y comprises a fatty acid; and wherein: m is an integer between 1-30; and Fc₁ and Fc₂ each comprise an Fc region.

[chemical structure]

[0170] In some embodiments disclosed herein, are compounds of the structure above or pharmaceutically acceptable salts thereof, wherein R₃ and R₄ are independently selected from C₁ to C₅ alkyl; Z comprises O, NH, C₁ to C₃₀ alkyl, (OCH₂CH₂)ₘ, an amino acid polymer, or a combination thereof, X comprises a therapeutic polypeptide; and Y comprises a fatty acid; and wherein: m is an integer between 1-30; and Fc₁ and Fc₂ each comprise an Fc region.

[chemical structure]

[0171] In some embodiments disclosed herein, are compounds of the structure above or pharmaceutically acceptable salts thereof, wherein R₃ and R₄ are independently selected C₁ to C₅ alkyl; R₅ and R₆ are independently C₁ to C₅ alkyl or absent; U is tertiary amine or 1,3,5-substituted phenyl; Z comprises O, NH, C₁ to C₃₀ alkyl, (OCH₂CH₂)ₘ, an amino acid polymer, or a combination thereof, X comprises a therapeutic polypeptide; and Y comprises a fatty acid; and wherein: m is an integer between 1-30; and D₁ and D₂ independently comprise an amide, amine, imine, sulfonamide, thiourea, urea, thioether, or combinations thereof.

[chemical structure]

[0172] In some embodiments disclosed herein, are compounds of the structure above or pharmaceutically acceptable salts thereof, wherein: R₃ and R₄ are independently selected from C₁ to C₅ alkyl; R⁵ and R⁶ are independently C₁ to C₅ alkyl or absent; U is tertiary amine or 1,3,5-substituted phenyl; Z comprises O, NH, C₁ to C₃₀ alkyl, (OCH₂CH₂)ₘ, an amino acid polymer, or a combination thereof, X comprises a therapeutic polypeptide; and Y comprises a fatty acid; and wherein: m is an integer between 1-30.

[chemical structure]

[0173] In some embodiments disclosed herein, are compounds of the structure above or pharmaceutically acceptable salts thereof, wherein: R₃ and R₄ are independently selected C₁ to C₅ alkyl; R₅ and R₆ is C₁ to C₅ alkyl; and Z comprises O, NH, C₁ to C₃₀ alkyl, (OCH₂CH₂)ₘ, an amino acid polymer, or a combination thereof, X comprises a therapeutic polypeptide; and Y comprises a fatty acid; and wherein: m is an integer between 1-30.

[chemical structure]

[0174] In some embodiments disclosed herein, are compounds of the structure above or pharmaceutically acceptable salts thereof, wherein R₃ and R₄ are independently selected from C₁ to C₅ alkyl; Z comprises O, NH, C₁ to C₃₀ alkyl, (OCH₂CH₂)ₘ, an amino acid polymer, or a combination thereof, X comprises a therapeutic polypeptide; and Y comprises a fatty acid; and wherein: m is an integer between 1-30.

[0175] In some embodiments, compounds of present disclosure includes a linker, L, which connects Z via a nucleophilic conjugate addition reaction to another moiety, such as one or more cysteine amino acids in an Fc region of an antibody or fragment thereof, as shown in Formula II, or to another suitable nucleophile, such as an amide, amine, imine, sulfonamide, thiourea, urea, thioether, thiol, cysteine, or combinations thereof, as shown in the structures disclosed herein.

[0176] In some embodiments, the linker may include a central trivalent linking unit, U, as shown in the structures disclosed herein. One of the portions of the linker can be attached to Z. The other two portions of the linkers comprise a maleimide functional group, an electrophile, which can be used to selectively connect Z to two nucleophiles in a nucleophilic conjugate addition reaction.

Nucleophilic Conjugate Addition Reactions with Maleimide Functional Groups

[0177] As disclosed herein, a linker, L, may be attached to Z, to yield a linked payload, wherein Z further comprises a therapeutic, X, e.g., a linked therapeutic. In some embodiments, the linker, L, comprises two maleimide functional groups. The maleimide functional groups may be used to attach Z to a different moiety, such as an Fc region of an antibody or fragment thereof, through a nucleophilic conjugate addition reaction.

[0178] In a nucleophilic conjugate addition reaction, the maleimide is an electrophile and reacts with a nucleophile forming a new covalent bond between the electrophilic carbon atom and a nucleophilic atom, which can lead to an opening of the maleimide functional group, as shown below:

[chemical structure]

[0179] A variety of nucleophiles may be used to react with the electrophilic maleimide functional group. Suitable nucleophiles include moieties comprising one or more nitrogen and/or sulfur atoms in a functional group wherein the nitrogen and/or sulfur atom can serve as an electron-rich nucleophile. Suitable examples of nucleophiles include moieties comprising one or more of the following functional groups: amide, amine, imine, sulfonamide, thiol, thiourea, urea, or combinations thereof, which are shown in the structures below:

[chemical structure]

[0180] In particular, the amino acid cysteine is found in many peptides, antibodies, proteins, or the like, as shown below, and includes a thiol functional group, which may be used as a nucleophile to form a thioether between a peptide, antibody, protein, or the like and the linker, the linked payload, and/or the linked therapeutic.

[chemical structure]

[0181] The conditions for nucleophilic conjugate addition reactions are well known to a person of ordinary skill in the art. The conditions may vary according to the selected nucleophiles and electrophiles used for a particular reaction. As disclosed herein, are compounds and/or conjugate compounds comprising a linked payload that has been attached to another moiety through a nucleophilic conjugate addition reaction.

Nucleophilic Aromatic Substitution (SNAr) Reactions with Methylsulfonyl-Tetrazole or Methylsulfonyl-Oxadiazole Functional Groups

[0182] As disclosed herein, a linker, L, may be attached to Z, to yield a linked payload, wherein Z further comprises a therapeutic, X, e.g., a linked therapeutic. In some embodiments, the linker, L, comprises two methyl sulfonyl-tetrazole or two methyl sulfonyl-oxadiazole functional groups. The methyl sulfonyl-tetrazole or methyl sulfonyl-oxadiazole functional groups may be used to attach Z to a different moiety, such as an Fc region of an antibody or fragment thereof, through a nucleophilic aromatic substitution reaction.

[0183] In a nucleophilic aromatic substitution reaction, the methyl sulfonyl of the tetrazole or the methyl sulfonyl of the oxadiazole acts as a leaving group that is displaced with a nucleophile to form a new covalent bond between the nucleophilic atom and an electrophilic carbon atom as shown below:

[chemical structure]

[0184] A variety of nucleophiles may be used to react with the electrophilic methyl sulfonyl tetrazole functional group or the methyl sulfonyl oxadiazole functional group. Suitable nucleophiles include moieties comprising one or more nitrogen and/or sulfur atoms in a functional group where the nitrogen and/or sulfur atom can serve as an electron-rich nucleophile. Suitable examples of nucleophiles include moieties comprising of thiol which are also shown below:

[chemical structure]

[0185] In particular, the amino acid cysteine is found in many peptides, antibodies, proteins, or the like, as shown below, and includes a thiol functional group, which may be used as a nucleophile to form a thioether between a peptide, antibody, protein, or the like and the linker, the linked payload, and/or the linked therapeutic.

[chemical structure]

[0186] The conditions for aromatic nucleophilic substitution reactions are well known to a person of ordinary skill in the art. The conditions may vary according to the selected nucleophiles and electrophiles used for a particular reaction. As disclosed herein, are compounds and/or conjugate compounds comprising a linked payload that has been attached to another moiety through an aromatic nucleophilic substitution reaction.

Nucleophilic Substitution (S_{N}2) Reactions with Bromo Acetyl Functional Groups

[0187] As disclosed herein, a linker L, can be attached to Z, to yield a linked payload, or if Z comprises a therapeutic, a linked therapeutic. The linker, as disclosed herein, comprises two or more, or preferably two, bromo acetyl functional groups, as shown in Formula V-D. The bromo acetyl functional group can be used to attach Z to a different moiety, such as an Fc region, through a nucleophilic substitution reaction.

[0188] In the nucleophilic substitution reaction, the bromide of the bromo acetyl acts as a leaving group that is displaced with a nucleophile to form a new covalent bond between the nucleophilic atom and an electrophilic carbon atom as shown below:

[chemical structure]

[0189] A variety of nucleophiles can be used to react with the electrophilic bromo acetyl functional group. Suitable nucleophiles include moieties comprising one or more nitrogen and/or sulfur atoms in a functional group where the nitrogen and/or sulfur atom can serve as an electron-rich nucleophile. Suitable examples of nucleophiles include moieties comprising one or more of the following functional groups: amide, amine, imine, sulfonamide, thiol, thiourea, urea, or combinations thereof, which are shown in the structures below:

[chemical structure]

[0190] In particular, the amino acid cysteine is found in many peptides, antibodies, proteins, or the like, as shown below, and includes a thiol functional group, which may be used as a nucleophile to form a thioether between a peptide, antibody, protein, or the like and the linker, the linked payload, and/or the linked therapeutic.

[chemical structure]

[0191] The conditions for nucleophilic substitution reactions are well known to a person of ordinary skill in the art. The conditions may vary according to the selected nucleophiles and electrophiles used for a particular reaction. Disclosed herein, are compounds and/or conjugate compounds comprising a linked payload that has been attached to another moiety through a nucleophilic substitution reaction.

### Duration of Action

[0192] The compounds described herein include features that provide extended duration of action for a therapeutic polypeptide. These features include conjugation to an antibody or fragment thereof, such as an Fc region, acylation of the therapeutic polypeptide with an albumin-binding moiety, such as a fatty acid, and/or incorporation of structural features in the therapeutic polypeptide itself that provide for enhanced proteolytic stability. In certain embodiments, compounds that comprise each or all of these features have prolonged duration of action, enabling less frequent administration compared to currently available therapies. For example, in the context of therapeutic polypeptides having binding and activity at one or more of the GIP, GLP-1 and/or glucagon receptors, certain compounds described herein have duration of action that allows for their use in methods of treatment with dosing as infrequent as once-monthly.

[0193] Also disclosed herein are methods of increasing the duration of action of a therapeutic. The method can comprise the step of attaching the therapeutic to a trivalent linker to yield a linker therapeutic.

[0194] The method may further include the step of conjugating the linked therapeutic to at least a portion of an antibody or fragment thereof, e.g., an Fc region, via a nucleophilic addition or substitution reaction. These reactions occur between the linked therapeutic and two nucleophiles present in the Fc region, such as sulfur atoms and/or anions, resulting in the formation of a conjugate compound.

[0195] The resulting conjugate compound comprises a therapeutic molecule covalently attached to the disclosed linkers, which are in turn conjugated to the Fc fragment. The conjugation extends the duration of action beyond that of the unbound therapeutic.

[0196] In certain embodiments, the linkers disclosed herein offer notable advantages as the reaction conditions are mild relative to other nucleophilic addition or substitution reactions that have been disclosed with other linkers. For example, the disclosed linkers may be combined with the Fc region of an antibody or fragment thereof with minimal heating. Specifically, the disclosed linkers can be conjugated to the Fc region of an antibody or fragment thereof by mixing the linked therapeutic and a reduced Fc region for no more than 2 hours, at temperatures not exceeding 30° C. or, in certain cases, 25° C.

### Linker Preparations

### Preparation 1

### 4-(Bis(2-((tert-butoxycarbonyl)amino)ethyl)amino)-4-oxobutanoic Acid

[chemical structure]

[0197] A solution of succinic anhydride (0.990 g, 9.88 mmol) in DCM (40 mL) was added over a 30-minute period to a solution of 10-oxa-2,5,8-triazadodecanoic acid, 11,11-dimethyl-9-oxo-,1,1-dimethylethyl ester (3.0 g, 9.88 mmol) in DCM (40 mL) at ambient temperature under N₂. The reaction was stirred at ambient temperature for 48 hrs then diluted with H₂O (50 mL) and extracted with DCM (3×40 mL). The organic layers were combined, washed with saturated aqueous NH₄Cl solution, aqueous NaHCO₃, and brine. The organic layer was dried over MgSO₄, filtered, and concentrated in vacuo. The material was absorbed onto silica gel with the aid of DCM, then concentrated under reduced pressure to a free-flowing residue. The residue was purified by normal phase silica gel chromatography and eluted with DCM (5 min) then DCM/MeOH (9:1) to afford the title compound (2.84 g, 70%) as white powder. ES/MS (m/z): 402 (M−).

### Preparation 2

### 1-(4-(5-(Methylsulfonyl)-1H-tetrazol-1-yl)phenoxy)-12-(2-(2-(2-(2-(4-(5-(methylsulfonyl)-1H-tetrazol-1-yl)phenoxy)ethoxy)ethoxy)acetamido)ethyl)-8,13-dioxo-3,6-dioxa-9,12-diazahexadecan-16-oic Acid

[chemical structure]

[0198] 4-(Bis(2-((tert-butoxycarbonyl)amino)ethyl)amino)-4-oxobutanoic acid (0.47 g, 1.05 mmol) was dissolved into DCM (3 mL), then TFA (2 mL) was added. The reaction was stirred at ambient temperature for 3 hrs then concentrated in vacuo. Toluene (10 mL) was added to the residue and the mixture was concentrated in vacuo. This process was repeated once more. The residue was dried under vacuum for two hrs then dissolved into DMF (5 mL). DIEA (0.41 g, 3.15 mmol) was added followed by a solution of 2,5-dioxopyrrolidin-1-yl 2-(2-(2-(4-(5-(methylsulfonyl)-1H-tetrazol-1-yl)phenoxy)ethoxy)ethoxy)acetate (1.07 g, 2.10 mmol) in DMF (4 mL). The reaction was stirred at ambient temperature for 1 hr then diluted with DCM (100 ml), washed with brine followed by H₂O. The organic layer was dried over Na₂SO₄, filtered, and concentrated in vacuo. The residue was purified by normal phase silica gel chromatography. The column was eluted with DCM for 5 minutes then 0% to 20% methanol/DCM over 20 minutes to afford the title compound (0.86 g, 82%) as white solid. ES/MS (m/z): 940 (M+H).

### Preparation 3

### (S)-2-((tert-Butoxycarbonyl)amino)-4-(2,5-dioxo-2,5-dihydro-1H-pyrrol-1-yl)butanoic Acid

[chemical structure]

[0199] Added triethylamine (1 mL, 7.17 mmol) to a mixture of (2S)-4-amino-2-(tert-butoxycarbonylamino)butanoic acid (500 mg, 2.29 mmol) in 1,4-dioxane (10 mL), THF (5 mL) and water (5 mL). Stirred until a homogenous mixture was obtained, then added methyl 2,5-dioxo-2,5-dihydro-1H-pyrrole-1-carboxylate (370 mg, 2.31 mmol). Mixed at ambient temperature for 1 hour. Diluted with 50 mL of water, adjusted pH to ˜6 by adding 5N HCl. Extracted the aqueous with EtOAc (30 mL) and chloroform/iso-propanol (3×30 mL). Combined the organic phases, dried over sodium sulfate, filtered, and concentrated under reduced pressure. Purified the resulting residue via silica gel column chromatography eluting with 0-30% MeOH in DCM to give the titled compound (580 mg, 81%). ES/MS m/z: 199 (M-tBu).

### Preparation 4

### 2,5-Dioxopyrrolidin-1-yl (S)-2-((tert-butoxycarbonyl)amino)-4-(2,5-dioxo-2,5-dihydro-1H-pyrrol-1-yl)butanoate

[chemical structure]

[0200] Added dicyclohexylcarbodiimide (320 mg, 1.53 mmol) to a solution of (S)-2-((tert-butoxycarbonyl)amino)-4-(2,5-dioxo-2,5-dihydro-1H-pyrrol-1-yl)butanoic acid (400 mg, 1.27 mmol) and N-hydroxysuccinimide (180 mg, 1.53 mmol) in THF (6 mL). Stirred at ambient temperature for 3 hrs. Filtered to remove solids, then concentrated the filtrate under reduced pressure to provide the title compound (605 mg, 84%) which was used without purification. ES/MS m/z: 296 (M-tBu).

### Preparation 5

### (S)-2-((tert-Butoxycarbonyl)amino)-3-(2,5-dioxo-2,5-dihydro-1H-pyrrol-1-yl)propanoic Acid

[chemical structure]

[0201] Mixed (2S)-3-amino-2-(tert-butoxycarbonylamino)propanoic acid (5.00 g, 24.5 mmol) with 1M aqueous solution of sodium bicarbonate (130 mL, 130 mmol). Stirred at ambient temperature for 10 min until a clear solution was formed. Cooled the solution in an ice-water bath, and added methyl 2,5-dioxo-2,5-dihydro-1H-pyrrole-1-carboxylate (4.00 g, 25.0 mmol) as in three portions over 15 min. Continued stirring at 0° C. for 3 hrs. Added 100 mL of EtOAc and stirred under cooling, then added concentrated HCl to adjust pH to 1. Separated the layers and extracted the aqueous with DCM (4×50 mL). Combined the organic layers, washed with saturated aqueous NaCl, and dried over sodium sulfate. Removed the solvent under reduced pressure. Purified via silica gel column chromatography eluting with 0-40% MeOH in DCM to give the title compound (5.70 g, 66%). ES/MS m/z: 185 (M-tBu).

### Preparation 6

### 2,5-Dioxopyrrolidin-1-yl (S)-2-((tert-butoxycarbonyl)amino)-3-(2,5-dioxo-2,5-dihydro-1H-pyrrol-1-yl)propanoate

[chemical structure]

[0202] Added dicyclohexylcarbodiimide (484 mg, 2.32 mmol) to a mixture of (S)-2-((tert-butoxycarbonyl)amino)-3-(2,5-dioxo-2,5-dihydro-1H-pyrrol-1-yl)propanoic acid (550 mg, 1.54 mmol) and N-hydroxysuccinimide (272 mg, 2.31 mmol) in THF (5 mL). Stirred at ambient temperature until a precipitate appeared. Removed the solids by filtration and washed with DCM. Concentrate the filtrate under reduced pressure to give the title compound (1.18 g, 85%). ES/MS m/z: 282 (M+H-Boc).

### Fc Regions

[0203] In certain embodiments, the nucleophile capable of reacting with two or more functional groups on the linker is an Fc region, also known as a fragment crystallizable region. The Fc region constitutes the lower constant domain comprised of the full or partial hinge along with the CH2 and CH3 domains or a portion thereof. This Fc fragment may be effector functional, with full engagement to Fc receptors or contain mutations to limit or nullifying Fc receptor binding. Notably, Fc regions of particular antibody classes—such as IgA, IgD, IgE, IgG, IgM, or their combinations—can contain two or more cysteine residues that form a disulfide bridge within the N-terminal portion of the molecule or hinge region.

[0204] In some embodiments, the Fc region of an antibody may be modified before its attachment to the linker via a nucleophilic conjugate addition reaction. Such modifications may be designed to minimize unintended reactivity between the antibody and the linker, ensuring that the desired nucleophilic conjugation reaction proceeds efficiently.

[0205] In certain embodiments, the Fc region may be a modified version of the antibody's Fc domain, with alterations that include the blunting or removal of specific segments, such as hinge regions.

[0206] The disulfide bridge within appropriate Fc regions may be reduced, yielding two thiol groups that serve as nucleophiles capable of undergoing nucleophilic conjugate addition reactions with the maleimide functional groups of the linkers described herein.

[0207] Alternatively, the reduced disulfide bridge in suitable Fc regions may provide thiol nucleophiles that can participate in aromatic nucleophilic addition reactions with the methyl sulfonyl tetrazole or methyl sulfonyl oxadiazole functional groups of linkers as described herein.

### Exemplary Fc Regions

[0208] The term “Fc region” is used herein to define a C-terminal region of an immunoglobulin heavy chain that contains at least a portion of the constant region. The term includes native sequence Fc regions and variant Fc regions.

[0209] As used herein, the term “variant Fc region”, “Fc region variant” or “Fc region mutation” are used interchangeably and each refers to an amino acid sequence of a Fc region that differs from the sequence of a parent Fc region (or fragment thereof) by virtue of at least one amino acid substitution.

[0210] As used herein, an “amino acid substitution” refers to the replacement of at least one existing amino acid residue in a given amino acid sequence with another different “replacement” amino acid residue.

[0211] Furthermore, substitutions are named herein by the amino acid in the parent Fc followed by the position number at which the substitution occurs followed by the amino acid substituted for the amino acid in the parent Fc region at the same position. For example, the human IgG1 Fc region variant P247I indicates that a proline residue at position 247 of the parent human IgG1 Fc region is substituted by an isoleucine residue).

[0212] In one embodiment, a human IgG heavy chain Fc region extends from Cys229 to the carboxyl-terminus of the heavy chain. However, the C-terminal lysine (Lys447) of the Fc region may or may not be present. Unless otherwise specified herein, numbering of amino acid residues in the Fc region or constant region is according to the EU numbering system, also called the EU index, as described in Kabat et al., Sequences of Proteins of Immunological Interest, 5th Ed. Public Health Service, National Institutes of Health, Bethesda, MD, 1991.

[0213] In certain embodiments, the human IgG4 Fc amino acid sequence (hIgG4) is utilized for re-bridging conjugation.

(SEQ ID NO: 935)
AGCPAPEAAGGPSVFLFPPKPKDTLMISRTPEVTCVVVDVSQEDPEVQ
FNWYVDGVEVHNAKTKPREEQFNSTYRVVSVLTVLHQDWLNGKEYKCK
VSNKGLPSSIEKTISKAKGQPREPQVYTLPPSQEEMTKNQVSLTCLVK
GFYPSDIAVEWESNGQPENNYKTTPPVLDSDGSFFLYSRLTVDKSRWQ
EGNVFSCSVMHEALHNHYTQKSLSLSLG

[0214] The Fc region of SEQ ID NO:935 is a native IgG4 with a blunt hinge starting at position 229 (EU index numbering), with an additional N-terminal dipeptide comprised of alanine and glycine (AG). To minimize effector function, the Fc contains 2 mutations, F234A and L235A (EU index numbering) in the CH₂ domain as shown in bold and underlined. Unless otherwise specified, references to “Fc” in the nomenclature for compounds set forth below in Table 3 and described herein, refer to SEQ ID NO:935.

[0215] An IgG4 Fc region containing mutations at Q274K, Q355R and E419Q (SEQ ID NO:936) may be used to increase the overall pI of the Fc to help with biophysical properties where a more neutral peptide is used in the conjugation:

(SEQ ID NO: 936)
AGCPAPEAAGGPSVFLFPPKPKDTIMISRTPEVTCVVVDVSQEDPEVK
ENWYVDGVEVHNAKTKPREEQFNSTYRVVSVLIVLHQDWLNGKEYKCK
VSNKGLPSSIEKTISKAKGQPREPQVYTLPPSREEMTKNQVSLTCLVK
GFYPSDIAVEWESNGQPENNYKTTPPVLDSDGSFFLYSRLTVDKSRWQ
QGNVFSCSVMHEALHNHYTQKSLSLSLG

[0216] Unless otherwise specified, references to “Fc KRQ” in the nomenclature for compounds set forth below in Table 3 and described herein, refer to SEQ ID NO:936.

[0217] To mitigate N-terminal misprocessing in a CHO expression system, several specific signal peptides were identified which provided high titer and minimal N terminal clipping of the first alanine residue:

(SEQ ID NO: 937)
MGWSCIILFLVATATGVHS
(SEQ ID NO: 938)
MDSKVTIICIRFLFWFLLLCMLIGKSHT
(SEQ ID NO: 939)
MKICSLTLLSFLLLAAQVLLVEG
(SEQ ID NO: 940)
MDSKVTIICIRFLFWFLLLCMLIGKSHT

[0218] Alternative to changing the signal peptide, 6 alternative residues were explored in place of the alanine on the N-terminus, including Cysteine (C), arginine (R), isoleucine (I), leucine (L), tryosine (Y) and threonine (T), all of which prevented clipping. Alternatively, any of the 20 amino acids except for alanine, serine and glycine which could be used to replace the N terminal residue. Examples include isoleucine N terminal Fc (Fc IG KRQ) and Cysteine N terminal KRQ Fc (Fc N-Cys KRQ), which each include the F234A, L235A, Q274K, Q355R and E419Q mutations as shown in the sequences below.

(SEQ ID NO: 941)
IGCPAPEAAGGPSVFLFPPKPKDTLMISRTPEVTCVVVDVSQEDPEVKF
NWYVDGVEVHNAKTKPREEQFNSTYRVVSVLTVLHQDWLNGKEYKCKVS
NKGLPSSIEKTISKAKGQPREPQVYTLPPSREEMTKNQVSLTCLVKGFY
PSDIAVEWESNGQPENNYKTTPPVLDSDGSFFLYSRLTVDKSRWQQGNV
FSCSVMHEALHNHYTQKSLSLSLG
(SEQ ID NO: 942)
CGCPAPEAAGGPSVFLFPPKPKDTLMISRTPEVTCVVVDVSQEDPEVKF
NWYVDGVEVHNAKTKPREEQFNSTYRVVSVLTVLHQDWLNGKEYKCKVS
NKGLPSSIEKTISKAKGQPREPQVYTLPPSREEMTKNQVSLTCLVKGFY
PSDIAVEWESNGQPENNYKTTPPVLDSDGSFFLYSRLTVDKSRWQQGNV
FSCSVMHEALHNHYTQKSLSLSLG

Other examples include cysteine N terminal Fc (Fc N-Cys), which include the F234A and L235A mutations, as shown in the sequence below.

(SEQ ID NO: 1178)
CGCPAPEAAGGPSVFLFPPKPKDTLMISRTPEVTCVVVDVSQEDPEVQFN
WYVDGVEVHNAKTKPREEQFNSTYRVVSVLTVLHQDWLNGKEYKCKVSNK
GLPSSIEKTISKAKGQPREPQVYTLPPSQEEMTKNQVSLTCLVKGFYPSD
IAVEWESNGQPENNYKTTPPVLDSDGSFFLYSRLTVDKSRWQEGNVESCS
VMHEALHNHYTQKSLSLSLG

[0219] Unless otherwise specified, references to “Fc IG KRQ” in the nomenclature for compounds set forth below in Table 3 refer to SEQ ID NO:941, references to “Fc N-Cys KRQ” in the nomenclature for compounds set forth below in Table 3 refer to SEQ ID NO:942, and references to “Fc N-Cys” in the nomenclature for compounds set forth below in Table 3 refer to SEQ ID NO:1178.

[0220] Beyond the IgG4 subclass, an IgG1 Fc was also explored using an IgG1 with the effector knockout mutations F234A and L235A and P329A (EU index numbering):

(SEQ ID NO: 943)
AGCPAPEAAGGPSVFLFPPKPKDTLMISRTPEVTCVVVDVSHEDPEVKEN
WYVDGVEVHNAKTKPREEQYNSTYRVVSVLIVLHQDWINGKEYKCKVSNK
ALAAPIEKTISKAKGQPREPQVYTLPPSREEMTKNQVSLTCLVKGFYPSD
IAVEWESNGQPENNYKTTPPVLDSDGSFFLYSKLTVDKSRWQQGNVFSCS
VMHEALHNHYTQKSLSLSPGK

[0221] In some embodiments, a wild type IgG1 Fc with full effector function may be utilized in place of the effector knockout version:

(SEQ ID NO: 944)
AGCPAPELLGGPSVFLFPPKPKDTLMISRTPEVTCVVVDVSHEDPEVKEN
WYVDGVEVHNAKTKPREEQYNSTYRVVSVLTVLHQDWLNGKEYKCKVSNK
ALPAPIEKTISKAKGQPREPQVYTLPPSREEMTKNQVSLTCLVKGFYPSD
IAVEWESNGQPENNYKTTPPVLDSDGSFFLYSKLTVDKSRWQQGNVFSCS
VMHEALHNHYTQKSLSLSPGK

[0222] As an alternative to the re-bridging approach described above, engineered cysteines were introduced at positions 358, 398 and 415 of an IgG4 Fc with a full hinge starting at position 216 and containing the S228P mutation to enhance hinge stability. The Fc fragment contains 2 engineered cysteines and results in a symmetrical molecule with a peptide on each half or 2 per Fc conjugate.

eCys358 Fc:
(SEQ ID NO: 1179)
ESKYGPPCPPCPAPEAAGGPSVFLFPPKPKDTLMISRTPEVTCVVVDVSQEDPEVKENWYVDG
VEVHNAKTKPREEQFNSTYRVVSVLTVLHQDWLNGKEYKCKVSNKGLPSSIEKTISKAKGQPR
EPQVYTLPPSQEECTKNQVSLTCLVKGFYPSDIAVEWESNGQPENNYKTTPPVLDSDGSFFLY
SRLTVDKSRWQEGNVFSCSVMHEALHNHYTQKSLSLSLG
eCys398 Fc:
(SEQ ID NO: 1180)
ESKYGPPCPPCPAPEAAGGPSVFLFPPKPKDTLMISRTPEVTCVVVDVSQEDPEVKENWYVDG
VEVHNAKTKPREEQFNSTYRVVSVLTVLHQDWLNGKEYKCKVSNKGLPSSIEKTISKAKGQPR
EPQVYTLPPSQEEMTKNQVSLTCLVKGFYPSDIAVEWESNGQPENNYKTTPPVCDSDGSFFLY
SRLTVDKSRWQEGNVFSCSVMHEALHNHYTQKSLSLSLG
eCys415 Fc:
(SEQ ID NO: 1181)
ESKYGPPCPPCPAPEAAGGPSVFLFPPKPKDTLMISRTPEVTCVVVDVSQEDPEVKENWYVDG
VEVHNAKTKPREEQFNSTYRVVSVLIVLHQDWINGKEYKCKVSNKGLPSSIEKTISKAKGQPR
EPQVYTLPPSQEEMTKNQVSLTCLVKGFYPSDIAVEWESNGQPENNYKTTPPVLDSDGSFFLY
SRLTVDKCRWQEGNVFSCSVMHEALHNHYTQKSLSLSLG

[0223] To generate an Fc with a single peptide conjugated through engineered cysteines, an Fc with a full hinge starting at position 216, lacking any eCys site was generated with mutation F405L and R409K in the CH3 domain. An Fc exchange approach was utilized to pair a half Fc lacking an eCys site with a half Fc containing the desired eCys site, followed by conjugation.

(SEQ ID NO: 948)
ESKYGPPCPPCPAPEAAGGPSVFLFPPKPKDTLMISRTPEVTCVVVDVSQ
EDPEVKENWYVDGVEVHNAKTKPREEQFNSTYRVVSVLTVLHQDWLNGKE
YKCKVSNKGLPSSIEKTISKAKGQPREPQVYTLPPSREEMTKNQVSLTCL
VKGFYPSDIAVEWESNGQPENNYKTTPPVLDSDGSELLYSKLTVDKSRWQ
QGNVFSCSVMHEALHNHYTQKSLSLSLG

In certain embodiments, compounds of the present disclosure comprise an Fc region having at least 90% sequence identity, or at least 95% sequence identity, or at least 97% sequence identity, or at least 98% sequence identity, or at least 99% sequence identity to any of SEQ ID NOs. SEQ ID NOs:935-936, 941-948; 1178-1181.

### General Methodologies and Conditions for Addition of Fcs

[chemical structure]

[0224] Scheme 1, Step A depicts the synthesis of the H₂N-PEG₂₄-peptide generated by solid-phase peptide synthesis using Fmoc/t-Bu strategy on a Classic Symphony automated peptide synthesizer starting from RAPP AM-Rink Amide resin to afford compound (2). Step B shows the reaction of the PEGylated peptide (2) with the bis-Fmoc protected trivalent core where U is either 1,3,5-trisubstituted phenyl or tertiary amine (Preparation 1) to provide compound (3). In Step C the Fmoc groups were removed, and the resultant primary amines were reacted with NHS esters MalDap (commercially available), MalDab (Preparation 15), or Beta-MalDap (Preparation 17) to afford compound (4). In Step D, the peptide was cleaved from the resin. The bismaleimide functional groups were reacted with two reduced thiol functional groups in an Fc region in a nucleophilic conjugate addition reaction to yield the conjugate (5).

[chemical structure]

[0225] Scheme 2, Step A depicts the synthesis of the H₂N-PEG₂₄-peptide generated by solid-phase peptide synthesis to afford compound (1). Step B shows the coupling of the PEGylated peptide (21) with the bis-(methyl sulfonyl)tetrazole analog (Preparation 12) to provide compound (2). In Step C, the peptide was cleaved from the resin. The bis-(methyl sulfonyl)tetrazole functional groups were reacted with two reduced thiol functional groups in an Fc region in a nucleophilic conjugate addition reaction to yield the conjugate (3).

[chemical structure]

[0226] Scheme 3, Step A depicts the synthesis of the H₂N-PEG₂₄-peptide generated by solid-phase peptide synthesis to afford compound (1). Step B shows the coupling of the PEGylated peptide (2) with the bis-Fmoc protected trivalent core where U is either 1,3,5-trisubstituted phenyl or tertiary amine (Preparation 1) to provide compound (2). In Step C the Fmoc groups were removed, and the resultant primary amines were reacted with 2,5-dioxopyrrolidin-1-yl 2-bromoacetate to provide compound (3). The functional groups of compound (3) were reacted with two reduced thiol functional groups in an Fc region in a nucleophilic conjugate addition reaction to yield the conjugate (4).

### Therapeutic Polypeptides

[0227] The term “therapeutic polypeptide” refers to any amino acid polymer having activity suitable for use in treatment and/or prevention of a disease or condition. The conjugate structures herein may be used to provide extended duration of action for a variety of therapeutic polypeptides. A non-limiting list of examples of such therapeutics includes the following, or variants thereof. GIP, GLP-1: GLP-2; GIP; oxyntomodulin (OXM); Amylin; Apelin; Urocortin (UCN), ANP; BNP; CNP; parathyroid hormone (PTH); MC4 agonist; Somatostatin; GDF15; peptide YY (PYY); Pancreatic poly peptide; ACTH; VIP; Oxytocin; Grehlin; Gastrin; Insulin; human growth hormone (hGH): fibroblast grown factor 21 (FGF21); interleukin 2 (IL2); IL10; IL15; IL22; IL7; Pepstatin; Calcitonin; erythropoietin (EPO); thrombopoietin and receptor agonists; Angiotensin; Vasopressin; Thymosin beta-4; Guanylate cyclase-C agonists: epidermal growth factor (EGF): alpha-1-anti-trypsin: corticotropin releasing hormone (CRH); GnRH; Thymosin alpha 1; follicle stimulating hormone (FSH); thyroid stimulating hormone (TSH); thyroid releasing hormone (TRH); melanocortin stimulating hormone (MSH): apo-CII mimetic peptide; Factor IX: Factor VIII: Factor X; Granulocyte colony-stimulating factor: Interferon-alpha; beta-amyloid inhibitors; CD40 ligand: CD137 agonist; CD24: CTLA4: TNFR; ENPP1; SIRP-alpha; and Ulinastatin.

[0228] In certain embodiments, the therapeutic polypeptide comprises an agonist at one or more of the GIP, GLP-1 and glucagon receptors. GIP is a 42-amino acid peptide and is an incretin which plays a physiological role in glucose homeostasis by stimulating insulin secretion from pancreatic beta cells in the presence of glucose. GLP-1 is a 36-amino acid peptide and is an incretin which stimulates glucose-dependent insulin secretion, and which has been shown to prevent hyperglycemia in diabetics. The major biologically active fragment of GLP-1 is produced as a 30-amino acid, C-terminal amidated peptide (GLP-1₇₋₃₆). Glucagon is a 29-amino acid peptide that helps maintain blood glucose by binding to and activating glucagon receptors on hepatocytes, causing the liver to release glucose, stored in the form of glycogen, through a process called glycogenolysis.

[0229] In certain embodiments, exemplary compounds of the present disclosure comprise a dual agonist at the GIP and GLP-1 receptors. In some other embodiments, exemplary compounds of the present disclosure comprise a triple agonist at the GIP, GLP-1 and glucagon receptors.

[0230] Compounds of the present disclosure having activity at one or more of the GIP, GLP-1 and/or glucagon receptors have potential for therapeutic value in a number of conditions, diseases or disorders, including, but not limited to, T2DM, obesity, dyslipidemia; cardiovascular disease (CVD); major adverse cardiovascular events (MACE); chronic kidney disease (CKD); heart failure (HF); hypertension (HT); peripheral arterial disease (PAD); obstructive sleep apnea (OSA); metabolic syndrome; type 2 diabetes mellitus (T2DM); glycemic control; osteoarthritis (OA); chronic lower back pain (CLBP); neurodegenerative and/or cognitive disorders such as Alzheimer's disease (AD); Parkinson's disease; metabolic steatohepatitis (MASH): hepatic cirrhosis; fatty liver disease (FLD); polycystic ovary syndrome and/or alcohol abuse disorder, NAFLD and NASH, metabolic syndrome, bone-related disorders, See. e.g., Jall et al. (2017) Mol. Metab. 6:440-446; Carbone et al. (2016) J. Gastroenterol. Hepatol. 31:23-31; Finan et al. (2016) Trends Mol. Med. 22:359-376; Choi et al. (2017) Potent body weight loss and efficacy in a NASH animal model by a novel long-acting GLP-1/Glucagon/GIP triple-agonist (HM15211), ADA Poster 1139-P; Ding (2008) J. Bone Miner. Res. 23:536-543; Tai et al. (2018) Brain Res. 1678:64-74; Müller et al. (2017) Physiol. Rev. 97:721-766; Finan et al. (2013) Sci. Transl. Med. 5:209; Hölschcr (2014) Biochem. Soc. Trans. 42:593-600.

[0231] In certain embodiments, the therapeutic polypeptide comprises:

(SEQ ID NO: 1218)
X₁X₂X₃X₄TX₆TSDX₁₀X₁₁X₁₂X₁₃LX₁₅X₁₆KAX₁₉X₂₀X₂₁FIX₂₄X₂₅LX₂₇X₂₈X₂₉
X₃₀X₃₁X₃₂X₃₃X₃₄X₃₅X₃₆X₃₇X₃₈X₃₉X₄₀X₄₁,

wherein:
[0232] X₁ is H, NMeY, or Y;
[0233] X₂ is Ac4c, Aib, αMeS, Iva, or D-Ala;
[0234] X₃ is Q, E, or H;
[0235] X₄ is G or D-Ala;
[0236] X₆ is αMeF(2F), F, or αMeF;
[0237] X₁₀ is 4-Pal, Y, or V;
[0238] X₁₁ is Aib, S, or αMeS;
[0239] X₁₂ is I or S;
[0240] X₁₃ is L or αMeL;
[0241] X₁₅ is D or E;
[0242] X₁₆ is K, E or Orn;
[0243] X₁₉ is A or Q
[0244] X₂₀ is Aib, αMeL, Iva, or αMe4Pal;
[0245] X₂₁ is E, Q, D, or Orn;
[0246] X₂₄ is K, Q, E, D-Glu, or D-Gln;
[0247] X₂₅ is αMeY, W, or Y;
[0248] X₂₇ is I, L, or V;
[0249] X₂₈ K, E or A;
[0250] X₂₉ is Aib, G, or Q;
[0251] X₃₀ is G or S;
[0252] X₃₁ is P, G, E, or Orn;
[0253] X₃₂ is absent, S or P;
[0254] wherein if X₃₂ is S or P, then X₃₃ is S;
[0255] wherein if X₃₃ is S, then is X₃₄ is G or Aib;
[0256] wherein if X₃₄ is G or Aib, then X₃₅ is absent or A or Orn;
[0257] wherein if X₃₅ is A or Orn, then X₃₆ is absent or P;
[0258] wherein if X₃₆ is P, then X₃₇ is absent or P;
[0259] wherein if X₃₇ is P, then X₃₈ is absent or P;
[0260] wherein if X₃₈ is P, then X₃₉ is absent or S, Orn, or G;
[0261] wherein if X₃₉ is S, Orn, or G, then X₄₀ is absent, K, or G;
[0262] wherein if X₄₀ is K or G, then X₄₁ is absent or S or G;
[0263] wherein if X₃₂ is absent, then X₃₃ through X₄₁ are also absent;
[0264] wherein if X₃₅ is absent, then X₃₆ through X₄₁ are also absent;
[0265] wherein if X₃₆ is absent, then X₃₇ through X₄₁ are also absent;
[0266] wherein if X₃₇ is absent, then X₃₈ through X₄₁ are also absent;
[0267] wherein if X₃₈ is absent, then X₃₉ through X₄₁ are also absent;
[0268] wherein if X₃₉ is absent, then X₄₁ and X₄₁ are also absent;
[0269] wherein if X₄₀ is absent, then X₄₁ is absent.

[0270] In certain embodiments, the therapeutic polypeptide comprises specific features that result in optimization of properties such as binding and/or activity at the GIP, GLP-1 and/or glucagon receptors, increasing proteolytic stability, improving developability and/or optimization of pharmacokinetics and pharmacodynamics. In certain embodiments, the therapeutic polypeptide comprises one or more of X₆ is αMeF(2F); X₁₀ is Y; X₁₁ is Aib or αMeS; X₁₂ is I; X₁₃ is αMeL; X₁₅ is D; X₁₆ is Orn; X₂₀ is Aib; X₂₁ is E or Q; X₂₄ is E; X₂₅ is αMeY; X₂₇ is I; X₂₈ is K or E; X₂₉ is Aib or G; X₃₀ is S; X₃₁ is P or G; X₃₂ is absent or S; X₃₂—X₃₉ is SSGAPPPS; and X₄₀ is K. In certain embodiments, In certain embodiments, the therapeutic polypeptide comprises each of X₁₀ is Y; X₂₄ is E; X₃₀ is S; and X₄₀ is K.

[0271] In certain embodiments, the therapeutic polypeptide comprises a 90% sequence identity to any of SEQ ID NO:1 to SEQ ID NO:186 or SEQ ID NO:996 to SEQ ID NO:1038. In certain embodiments, the therapeutic polypeptide comprises any of SEQ ID NO:1 to SEQ ID NO:186 or SEQ ID NO:996 to SEQ ID NO:1038.

[0272] In certain embodiments, the therapeutic polypeptide comprises:

(SEQ ID NO: 1219)
YAibEGTX₆TSDX₁₀X₁₁X₁₂X₁₃LX₁₅X₁₆KAQX₂₀X₂₁FIX₂₄X₂₅LX₂₇X₂₈X₂₉
X₃₀X₃₁X₃₂X₃₃X₃₄X₃₅X₃₆X₃₇X₃₈X₃₉X₄₀X₄₁,

wherein:
[0273] X₆ is αMeF(2F), F, or αMeF;
[0274] X₁₀ is 4-Pal, Y, or V;
[0275] X₁₁ is Aib or S;
[0276] X₁₂ is I or S;
[0277] X₁₃ is L or αMeL;
[0278] X₁₅ is D or E;
[0279] X₁₆ is E or Orn;
[0280] X₂₀ is Aib, αMeL, or Iva;
[0281] X₂₁ is E, Q, D, or Orn;
[0282] X₂₄ is K, Q, E, or D-Glu;
[0283] X₂₅ is αMeY or Y;
[0284] X₂₇ is I, L, or V;
[0285] X₂₈ K, E or A;
[0286] X₂₉ is Aib, G, or Q;
[0287] X₃₀ is G or S;
[0288] X₃₁ is P, G, E, or Orn;
[0289] X₃₂ is absent, S, or P;
[0290] wherein if X₃₂ is S or P, then X₃₃ is S:
[0291] wherein if X₃₃ is S, then is X₃₄ is G or Aib;
[0292] wherein if X₃₄ is G or Aib, then X₃₅ is absent, A, or Orn;
[0293] wherein if X₃₅ is A or Orn, then X₃₆ is absent or P;
[0294] wherein if X₃₆ is P, then X₃₇ is absent or P;
[0295] wherein if X₃₇ is P, then X₃₈ is absent or P;
[0296] wherein if X₃₈ is P, then X₃₉ is absent, S, Orn, or G;
[0297] wherein if X₃₉ is S, Orn, or G, then X₄₀ is absent, K, or G;
[0298] wherein if X₄₀ is K or G, then X₄₁ is absent, S, or G;
[0299] wherein if X₃₂ is absent, then X₃₃ through X₄₁ are also absent;
[0300] wherein if X₃₅ is absent, then X₃₆ through X₄₁ are also absent;
[0301] wherein if X₃₆ is absent, then X₃₇ through X₄₁ are also absent;
[0302] wherein if X₃₇ is absent, then X₃₈ through X₄₁ are also absent;
[0303] wherein if X₃₈ is absent, then X₃₉ through X₄₁ are also absent;
[0304] wherein if X₃₉ is absent, then X₄₀ and X₄₁ are also absent;
[0305] wherein if X₄₀ is absent, then X₄₁ is absent.

[0306] In some embodiments, the polypeptide of SEQ ID NO: 1219 has dual agonist activity at the GIP and GLP-1 receptors. In some embodiments, the polypeptide comprises at least one of: X₁₀ is Y; X₁₁ is Aib; X₂₄ is E and X₃₀ is S. In some embodiments, the polypeptide comprises at least two of: X₁₀ is Y; X₁₁ is Aib; X₂₄ is E and X₃₀ is S. In some embodiments, the polypeptide comprises each of: X₁₀ is Y; X₁₁ is Aib; X₂₄ is E and X₃₀ is S.

[0307] In some embodiments, the polypeptide further comprises at least one of X₆ is αMeF(2F); X₁₂ is I; X₁₃ is αMeL; X₁₅ is D; X₁₆ is Orn; X₂₀ is Aib; X₂₁ is E or Q; X₂₅ is αMeY; X₂₇ is 1; X₂₈ is K or E; X₂₉ is Aib or G; X₃₁ is P or G; X₃₂ is absent or S; and X₄₀ is K. In some embodiments, the polypeptide comprises each of X₆ is αMeF(2F); X₁₂ is I; X₁₃ is αMeL; X₁₅ is D; X₁₆ is Orn; X₂₀ is Aib; X₂₁ is E or Q; X₂₅ is αMeY; X₂₇ is I; X₂₈ is K or E; X₂₉ is Aib or G; X₃₁ is P or G; X₃₂ is absent or S; and X₄₀ is K. In some embodiments, X₂₁ is E; X₂₈ is E; X₂₉ is G; X₃₁ is P, and X₃₂ is S.

[0308] In certain embodiments, the therapeutic polypeptide comprises each of X₁ is Y; X₂ is Aib; X₃ is E; X₄ is G; X₆ is αMeF(2F); X₁₀ is 4-Pal or Y; X₁₁ is Aib or S; X₁₂ is I; X₁₃ is αMeL; X₁₅ is D; X₁₆ is E or Orn; X₁ is Q; X₂₀ is Aib; X₂₁ is E; X₂₄ is Q, E, or D-Glu; X₂₃ is αMeY; X₂₇ is I; X₂₈ E; X₂₉ is Aib or G; X₃₀ is G or S; X₃₁ is P; X₃₂ is G or S; wherein if X₃₂ is S then X₃₃ is S; X₃₄ is G; X₃₅ is A; X₃₆ is P; X₃₇ is P; X₃₈ is P; X₃₉ is S; X₄₀ is K; and X₄₁ is absent; wherein if X₃₂ is G, then X₃₃ through X₄₁ are absent. In certain embodiments, the therapeutic polypeptide comprises at least one of: X₁₀ is Y or 4-Pal; X₁₁ is Aib or S; X₂₄ is Q, E, or d-Glu, and X₃₀ is G or S. In certain embodiments, the therapeutic polypeptide comprises each of: X₁₀ is Y or 4-Pal; X₁₁ is Aib; X₂₄ is E; X₃₀ is S; and X₄₀ is K. In some embodiments, one or more of the amino acid modifications described above result in the therapeutic polypeptide having improved proteolytic stability. In some embodiments, one or more of the amino acid modifications described above result in the therapeutic polypeptide having increased activity at the GIP and/or GLP-1 receptors.

[0309] In some embodiments, the therapeutic polypeptide comprises a 90% sequence identity to any of SEQ ID NO:1 to SEQ ID NO:92 or SEQ ID NO:996 to SEQ ID NO:999. In some embodiments, the therapeutic polypeptide comprises one or more conservative amino acid substitutions to any of SEQ ID NO:1 to SEQ ID NO:92 or SEQ ID NO:996 to SEQ ID NO:999. In some embodiments, the therapeutic polypeptide comprises no more than 5, no more than 4, no more than 3, no more than 2 or no more than 1 conservative amino acid substitutions to any of SEQ ID NO:1 to SEQ ID NO:92 or SEQ ID NO:996 to SEQ ID NO:999. In some embodiments, the therapeutic polypeptide comprises any of SEQ ID NO:1 to SEQ ID NO:92 or SEQ ID NO:996 to SEQ ID NO:999. In some embodiments, the therapeutic polypeptide comprises any of SEQ ID NOs: 1, 2, 22, 43, 45, 48, 55, 56, 58, 59, 61, 66, 68 and 47.

[0310] In other embodiments, the therapeutic polypeptide comprises:

(SEQ ID NO: 1220)
X₁X₂X₃X₄TX₆TSDX₁₀X₁₁X₁₂X₁₃LX₁₅X₁₆KAQX₂₀X₂₁FIX₂₄X₂₅LX₂₇X₂₈X₂₉
X₃₀X₃₁X₃₂X₃₃X₃₄X₃₅X₃₆X₃₇X₃₈X₃₉X₄₀X₄₁,

wherein:
[0311] X₁ is H, NMeY, or Y;
[0312] X₂ is Ac4c, Aib, αMeS, Iva, or D-Ala;
[0313] X₃ is Q, E, or H;
[0314] X₄ is G or D-Ala;
[0315] X₆ is αMeF(2F), F, or αMeF;
[0316] X₁₀ is 4-Pal, Y, or V;
[0317] X₁₁ is Aib, S, or MeS;
[0318] X₁₂ is I or S;
[0319] X₁₃ is L or αMeL;
[0320] X₁₅ is D or E;
[0321] X₁₆ is E or Orn;
[0322] X₂₀ is Aib, αMeL, Iva, or αMe4Pal;
[0323] X₂₁ is E, Q, D, or Orn;
[0324] X₂₄ is K, Q, E, D-Glu, or D-Gln;
[0325] X₂₅ is αMeY or Y;
[0326] X₂₇ is I, L, or V;
[0327] X₂₈ K, E or A;
[0328] X₂₉ is Aib, G, or Q;
[0329] X₃₀ is G or S;
[0330] X₃₁ is P, G, E, or Orn;
[0331] X₃₂ is absent, S or P;
[0332] wherein if X₃₂ is S or P, then X₃₃ is S;
[0333] wherein if X₃₃ is S, then is X₃₄ is G or Aib;
[0334] wherein if X₃₄ is G or Aib, then X₃₅ is absent or A or Orn;
[0335] wherein if X₃₅ is A or Orn, then X₃₆ is absent or P;
[0336] wherein if X₃₆ is P, then X₃₇ is absent or P;
[0337] wherein if X₃₇ is P, then X₃₈ is absent or P;
[0338] wherein if X₃₈ is P, then X₃₉ is absent or S, Orn, or G;
[0339] wherein if X₃₉ is S, Orn, or G, then X₄₁ is absent, K, or G;
[0340] wherein if X₄₀ is K or G, then X₄₁ is absent or S or G;
[0341] wherein if X₃₂ is absent, then X₃₃ through X₄₁ are also absent;
[0342] wherein if X₃₅ is absent, then X₃₆ through X₄₁ are also absent;
[0343] wherein if X₃₆ is absent, then X₃₇ through X₄₁ are also absent;
[0344] wherein if X₃₇ is absent, then X₃₈ through X₄₁ are also absent;
[0345] wherein if X₃₈ is absent, then X₃₉ through X₄₁ are also absent;
[0346] wherein if X₃₉ is absent, then X₄₀ and X₄₁ are also absent;
[0347] wherein if X₄₀ is absent, then X₄₁ is absent.

[0348] In certain embodiments, the therapeutic polypeptide of SEQ ID NO: 1220 has tri-agonist activity at the GIP, GLP-1 and glucagon receptors. In some embodiments, the therapeutic polypeptide comprises at least one of: X₁₀ is Y, X₂₄ is E, X₃₀ is S and X₄₀ is K. In some embodiments, the therapeutic polypeptide comprises each of: X₁₀ is Y, X₂₄ is E, X₃₀ is S and X₄₀ is K.

[0349] In some embodiments, the therapeutic polypeptide comprises at least one of: X₁ is H or Y; X₂ is Ac4c or Aib; X₃ is Q; X₄ is G; X₆ is αMeF(2F); X₁₁ is αMeS; X₁₂ is I; X₁₃ is αMeL; X₁₅ is D; X₁₆ is Orn; X₂₀ is αMe4Pal; X₂₁ is E or Orn; X₂₃ is αMeY; X₂₇ is I; X₂₈ E; X₂₉ is Aib or G; X₃₁ is P; X₃₂ is S; X₃₃ is S; X₃₄ is G; X₃₅ is A; X₃₆ is P; X₃₇ is P; X₃₈ is P; X₃₉ is S. In some embodiments, the therapeutic polypeptide comprises each of: X₁ is H or Y; X₂ is Ac4c or Aib; X₃ is Q; X₄ is G; X₆ is αMeF(2F); X₁₁ is αMeS; X₁₁ is 1; X₁₃ is αMeL; X₁₅ is D; X₁₆ is Orn; X₂₀ is αMe4Pal; X₂₁ is E or Orn; X₂₅ is αMeY; X₂₇ is I; X₂₈ E; X₂₉ is Aib or G; X₃₁ is P; X₃₂ is S; X₃₃ is S; X₃₄ is G; X₃₅ is A; X₃₆ is P; X₃₇ is P; X₃₈ is P; X₃₉ is S. In some embodiments, X₁ is Y; X₂ is Aib; X₃ is Q; X₂₁ is E; X₂₉ is G.

[0350] In some embodiments, the therapeutic polypeptide comprises each of: X₁ is H or Y; X₂ is Aib; X₃ is Q; X₄ is G; X₆ is αMeF(2F); X₁₀ is Y or 4-Pal; X₁₁ is S or αMeS; X₁₂ is I; X₁₃ is αMeL; X₁₅ is D; X₂₀ is Aib or αMe4Pal; X₂₁ is E or Orn; X₂₄ is E or d-Glu; X₂₅ is αMeY; X₂₇ is L or I; X₂₈ is E; X₂₉—X₃₉ is GSPSSGAPPPS; and X₄₀ is K. In some embodiments, the therapeutic polypeptide comprises at least one of: X₁₀ is Y or 4-Pal; X₂₄ is E or d-Glu, and X₃₀ is S. In some embodiments, the therapeutic polypeptide comprises each of: X₁₀ is Y or 4-Pal; X₂₄ is E or d-Glu, X₃₀ is S and X₄₀ is K and is conjugated to the linker.

[0351] In some embodiments, one or more of the amino acid modifications described above result in the therapeutic polypeptide having improved proteolytic stability. In some embodiments, one or more of the amino acid modifications described above result in the therapeutic polypeptide having increased activity at the GIP and/or GLP-1 receptors.

[0352] In some embodiments, the therapeutic polypeptide comprises a 90% sequence identity to any of SEQ ID NOs: 93-186 or SEQ ID NOs:1000-1038. In some embodiments, the therapeutic polypeptide comprises one or more conservative amino acid substitutions to any of SEQ ID NOs: 93-186 or SEQ ID NOs:1000-1038. In some embodiments, the therapeutic polypeptide comprises no more than 5, no more than 4, no more than 3, no more than 2 or no more than 1 conservative amino acid substitutions to any of SEQ ID NOs: 93-186 or SEQ ID NOs:1000-1038. In some embodiments, the therapeutic polypeptide comprises any of SEQ ID NOs: 93-186 or SEQ ID NOs:1000-1038. In some embodiments, the therapeutic polypeptide comprises any of SEQ ID NOs: 97, 113, 128, 130, 144, 171, 183.

[0353] The structural features of the compounds described in certain embodiments herein result in them having appropriate activity at each of the GIP, GLP-1 and glucagon receptors to obtain the favorable effects of activity at each receptor (i.e., triple agonist activity), but not so much activity at any one receptor to either overwhelm the activity at the other two receptors or result in undesirable side effects when administered at a dose sufficient to result in activity at all three receptors.

[0354] The affinity of the polypeptides described herein for each of the GIP, GLP-1 and glucagon receptors may be measured using techniques known in the art for measuring receptor binding levels and is commonly expressed as an inhibitory constant (Ki) value. The activity of the polypeptides described herein at each of the receptors also may be measured using techniques known in the art, including, for example, the in vitro activity assays described below, and is commonly expressed as an effective concentration 50 (EC₅₀) value, which is the concentration of compound causing half-maximal simulation in a dose response curve.

[0355] In some embodiments, the polypeptides described herein are partial agonists at the GLP-1 receptor showing agonism of 80% or less compared to the native GLP-1₇₋₃₆ (SEQ ID NO:1221) as demonstrated by the HEK293 cell GLP-1 receptor internalization assay described herein. In other embodiments, the polypeptides described herein are full agonists at the GLP-1 receptor showing agonism of ≥80% compared to the native GLP-1₇₋₃₆ (SEQ ID NO:1221) as demonstrated by the HEK293 cell GLP-1 receptor internalization assay described herein. In some embodiments, the polypeptides described herein have greater potency at one or more of the glucagon, GIP and GLP-1 receptors as compared to native glucagon (SEQ ID NO:1222), GIP (SEQ ID NO:1223) and GLP-1₇₋₃₆ (SEQ ID NO:1221).

[0356] In addition to the sequences described herein, the polypeptides described herein may include one or more conservative amino acid substitutions, provided, however, that the polypeptides remain capable of binding to and activating GIP, GLP-1 and/or glucagon receptors.

[0357] The structural features of certain embodiments of compounds described herein also result in the compounds having many other beneficial attributes relevant to their developability as therapeutic treatments, including for improving solubility of the analogs in near neutral pH aqueous solutions, improving chemical and physical formulation stability, improving peptide membrane permeability in the presence of a permeation enhancer, extending the pharmacokinetic profile, and minimizing potential for injection site reaction or immunogenicity.

[0358] It should be noted that the combination of beneficial characteristics of exemplary analogs described herein is not the result of any single modification in isolation but is instead achieved through the novel combinations of the structural features described herein.

[0359] In some embodiments, the polypeptides described herein are amidated. In some embodiments, the polypeptides described herein have a modification of the C-terminal group, wherein the modification is NH₂ or absent. In some embodiments, the polypeptides described herein have an OH group at the C-terminal. A nonlimiting list of exemplary therapeutic polypeptides is provided below in Table 1.

TABLE 1
Exemplary Polypeptides

| SEQ ID NO: | Therapeutic Polypeptide |
|---|---|
| 1 | Y-Aib-EGT-αMeF(2F)-TSD-4Pal-SI-αMeL-LDEKAQ-Aib-EFIe-αMeY-LIEGSPSSGAPPPS |
| 2 | Y-Aib-EGT-αMeF(2F)-TSD-4Pal-SI-αMeL-LD-Orn-KAQ-Aib-EFIe-αMeY-LIEGSPSSGAPPPS |
| 3 | Y-Aib-EGT-αMeF(2F)-TSD-4Pal-SI-αMeL-LDEKAQ-Aib-EFIe-αMeY-LIEGGG |
| 4 | Y-Aib-EGT-αMeF(2F)-TSD-4Pal-SI-αMeL-LDEKAQ-Aib-EFIE-αMeY-LIEGSPSSGAPPPS |
| 5 | Y-Aib-EGT-αMeF(2F)-TSD-4Pal-Aib-I-αMeL-LDEKAQ-Aib-EFIE-αMeY-LIEGSPSSGAPPPS |
| 6 | Y-Aib-EGT-αMeF(2F)-TSD-4Pal-Aib-S-αMeL-LDEKAQ-Aib-EFIE-αMeY-LIEGSPSSGAPPPS |
| 7 | Y-Aib-EGT-αMeF(2F)-TSD-4Pal-SI-αMeL-LEEKAQ-Aib-EFIE-αMeY-LIEGSPSSGAPPPS |
| 8 | Y-Aib-EGT-αMeF(2F)-TSDV-Aib-I-αMeL-LD-EKAQ-Aib-EFIe-αMeY-LIEGSPSSGAPPPS |
| 9 | Y-Aib-EGT-αMeF(2F)-TSDV-Aib-I-αMeL-LD-Orn-KAQ-Aib-EFIe-αMeY-LIEGSPSSGAPPPS |
| 10 | Y-Aib-EGT-αMeF(2F)-TSDV-Aib-I-αMeL-LD-Orn-KAQ-Aib-EFIE-αMeY-LIEGSPSSGAPPPS |
| 11 | Y-Aib-EGT-αMeF(2F)-TSD-4Pal-SI-αMeL-LDEKAQ-Aib-EFIK-@MeY-LIEGSPSSGAPPPSGS |
| 12 | Y-Aib-EGT-αMeF(2F)-TSD-4Pal-SI-αMeL-LDEKAQ-Aib-EFIe-αMeY-LIKGSPSSGAPPPSGS |
| 13 | Y-Aib-EGT-αMeF(2F)-TSD-4Pal-SI-αMeL-LDEKAQ-Aib-EFIe-αMeY-LIEGG |
| 14 | Y-Aib-EGT-αMeF(2F)-TSD-4Pal-SI-αMeL-LDEKAQ-Aib-EFIe-αMeY-LIEG |
| 15 | Y-Aib-EGT-αMeF(2F)-TSD-4Pal-SI-αMeL-LDEKAQ-Aib-EFIE-αMeY-LIEGGG |
| 16 | Y-Aib-EGT-αMeF(2F)-TSD-4Pal-Aib-I-αMeL-LDEKAQ-Aib-EFIE-αMeY-LIEGGG |
| 17 | Y-Aib-EGT-αMeF(2F)-TSD-4Pal-SI-αMeL-LEEKAQ-Aib-EFIE-αMeY-LIEGGG |
| 18 | Y-Aib-EGT-αMeF(2F)-TSD-V-Aib-I-αMeL-LDEKAQ-Aib-EFIe-αMeY-LIEGGG |
| 19 | Y-Aib-EGT-αMeF(2F)-TSD-V-Aib-I-αMeL-LD-Orn-KAQ-Aib-EFIe-αMeY-LIEGGG |
| 20 | Y-Aib-EGT-αMeF(2F)-TSD-V-Aib-I-αMeL-LD-Orn-KAQ-Aib-EFIE-αMeY-LIEGGG |
| 21 | Y-Aib-EGT-αMeF(2F)-TSD-4Pal-SI-αMeL-LD-Orn-KAQ-Aib-EFIE-αMeY-LIEGGG |
| 22 | Y-Aib-EGT-αMeF(2F)-TSD-4Pal-Aib-I-αMeL-LD-Orn-KAQ-Aib-EFIE-αMeY-LIEGGG |
| 23 | Y-Aib-EGT-αMeF(2F)-TSD-4Pal-SI-αMeL-LE-Om-KAQ-Aib-EFIE-αMeY-LIEGGG |
| 24 | Y-Aib-EGT-αMeF(2F)-TSD-4Pal-SI-αMeL-LDEKAQ-Aib-EFIE-αMeY-LIKGSPSSGAPPPSGS |
| 25 | Y-Aib-EGT-αMeF(2F)-TSD-4Pal-SI-αMeL-LE-Om-KAQ-Aib-EFIE-αMeY-LIEGSPSSGAPPPS |
| 26 | Y-Aib-EGT-αMeF(2F)-TSD-4Pal-Aib-I-αMeL-LE-Orn-KAQ-Aib-EFIE-αMeY-LIEGGG |
| 27 | Y-Aib-EGT-αMeF(2F)-TSD-4Pal-Aib-I-αMeL-LD-Orn-KAQ-Aib-EFIe-αMeY-LIEGGG |
| 28 | Y-Aib-EGT-αMeF(2F)-TSD-4Pal-SI-αMeL-LD-Om-KAQ-Aib-EFIK-αMeY-LIEGSPSSGAPPPSGS |
| 29 | Y-Aib-EGT-αMeF(2F)-TSD-4Pal-Aib-I-αMeL-LD-Orn-KAQ-Aib-EFIK-αMe Y-LIEGSPSSGAPPPSGS |
| 30 | Y-Aib-EGT-αMeF(2F)-TSD-4Pal-Aib-I-αMeL-LD-Orn-KAQ-Aib-EFIE-αMeY-LIEGGPSSGAPPPSG |
| 31 | Y-Aib-EGT-αMeF(2F)-TSD-4Pal-Aib-I-αMeL-LD-Orn-KAQ-Aib-EFIE-αMeY-LIEGGESSGAPPPSG |
| 32 | Y-Aib-EGT-αMeF(2F)-TSD-4Pal-Aib-I-αMeL-LD-Orn-KAQ-Aib-EFIE-αMeY-LIEGG-Orn-SSGAPPPSG |
| 33 | Y-Aib-EGT-αMeF(2F)-TSD-4Pal-Aib-I-αMeL-LD-Orn-KAQ-Aib-EFIE-αMeY-LIEGGPPSGAPPPSG |
| 34 | Y-Aib-EGT-αMeF(2F)-TSD-4Pal-Aib-I-αMeL-LD-Orn-KAQ-Aib-EFIE-αMeY-LIEGGPPS-Aib-Orn-PPP-Orn-G |
| 35 | Y-Aib-EGT-αMeF(2F)-TSD-4Pal-Aib-I-αMeL-LD-Orn-KAQ-Aib-EFIE-αMeY-LIEGSPSSGAPPPGG |
| 36 | Y-Aib-EGT-αMeF(2F)-TSD-4Pal-Aib-I-αMeL-LD-Orn-KAQ-Aib-EFIK-αMeY-LIEGGPSSGAPPPSGG |
| 37 | Y-Aib-EGT-αMeF(2F)-TSD-4Pal-Aib-I-αMeL-LD-Orn-KAQ-Aib-EFIK-αMeY-LIEGGESSGAPPPSGG |
| 38 | Y-Aib-EGT-αMeF(2F)-TSD-4Pal-Aib-I-αMeL-LD-Orn-KAQ-Aib-EFIK-αMeY-LIEGG-Orn-SSGAPPPSGG |
| 39 | Y-Aib-EGT-αMeF(2F)-TSD-4Pal-Aib-I-αMeL-LD-Orn-KAQ-Aib-EFIK-αMeY-LIEGGPPSGAPPPSGG |
| 40 | Y-Aib-EGT-αMeF(2F)-TSD-4Pal-Aib-I-αMeL-LD-Orn-KAQ-Aib-EFIK-αMeY-LIEGGPPS-Aib-Orn-PPP-Orn-GG |
| 41 | Y-Aib-EGT-αMeF(2F)-TSD-4Pal-Aib-I-αMeL-LD-Orn-KAQ-Aib-EFIK-αMe Y-LIEGSPSSGAPPPGGG |
| 42 | Y-Aib-EGT-αMeF(2F)-TSD-4Pal-Aib-I-αMeL-LD-Orn-KAQ-Aib-EFIE-αMeY-LIEGGPSSG |
| 43 | Y-Aib-EGT-αMeF(2F)-TSD-4Pal-Aib-I-αMeL-LD-Orn-KAQ-Aib-EFIK-αMeY-LIEGGG |
| 44 | Y-Aib-EGT-αMeF(2F)-TSD-4Pal-Aib-I-αMeL-LD-Orn-KAQ-Aib-EFIK-αMeY-LIEGGPSSG |
| 45 | Y-Aib-EGT-αMeF(2F)-TSD-4Pal-Aib-I-αMeL-LD-Orn-KAQ-Aib-EFIE-αMeY-LIKGGG |
| 46 | Y-Aib-EGT-αMeF(2F)-TSD-4Pal-Aib-I-αMeL-LD-Orn-KAQ-Aib-EFIE-αMeY-LIKGGPSSG |
| 47 | Y-Aib-EGT-αMeF(2F)-TSD-4Pal-Aib-I-αMeL-LD-Orn-KAQ-Aib-EFIE-αMeY-LIEGSPSSGAPPPS |
| 48 | Y-Aib-EGT-αMeF(2F)-TSD-4Pal-Aib-I-αMeL-LD-Orn-KAQ-Aib-EFIE-αMeY-LIEGGPSSGAPPPS |
| 49 | Y-Aib-EGT-αMeF(2F)-TSD-4Pal-Aib-I-αMeL-LDEKAQ-Aib-EFIE-αMeY-LIEGGPSSGAPPPS |
| 50 | Y-Aib-EGT-αMeF(2F)-TSD-4Pal-Aib-I-αMeL-LD-Orn-KAQ-Aib-EFIe-αMeY-LIEGSPSSGAPPPS |
| 51 | Y-Aib-EGT-αMeF(2F)-TSD-4Pal-Aib-I-αMeL-LD-Orn-KAQ-Aib-EFIE-αMeY-LIEGG-Orn-SSGAPPPS |
| 52 | Y-Aib-EGT-αMeF(2F)-TSD-4Pal-Aib-I-αMeL-LD-Orn-KAQ-Aib-EFIE-αMeY-LIEGG-Orn |
| 53 | Y-Aib-EGT-αMeF(2F)-TSD-4Pal-Aib-I-αMeL-LD-Orn-KAQ-Aib-Orn-FIE-αMeY-LIEGSPSSGAPPPS |
| 54 | Y-Aib-EGT-αMeF(2F)-TSD-4Pal-Aib-I-αMeL-LD-Orn-KAQ-Aib-EFIQ-αMeY-LIEGSPSSGAPPPS |
| 55 | Y-Aib-EGT-αMeF(2F)-TSD-4Pal-SI-αMeL-LD-Orn-KAQ-Aib-EFIE-αMeY-LIEGSPSSGAPPPS |
| 56 | Y-Aib-EGT-αMeF(2F)-TSD-4Pal-Aib-I-αMeL-LD-Orn-KAQ-Aib-EFIE-αMeY-LIE-Aib-SPSSGAPPPS |
| 57 | Y-Aib-EGT-αMeF(2F)-TSD-4Pal-Aib-I-αMeL-LD-Orn-KAQ-Aib-EFIe-αMeY-LIE-Aib-SPSSGAPPPS |
| 58 | Y-Aib-EGT-αMeF(2F)-TSD-4Pal-SI-αMeL-LD-Om-KAQ-Aib-EFIQ-αMeY-LIEGSPSSGAPPPS |
| 59 | Y-Aib-EGT-αMeF(2F)-TSDY-Aib-I-αMeL-LD-Orn-KAQ-Aib-EFIE-αMeY-LIEGSPSSGAPPPS |
| 60 | Y-Aib-EGT-αMeF(2F)-TSDY-Aib-I-αMeL-LD-Orn-KAQ-Aib-EFIQ-αMeY-LIEGSPSSGAPPPS |
| 61 | Y-Aib-EGT-αMeF(2F)-TSDY-Aib-I-αMeL-LD-Orn-KAQ-Aib-EFIe-αMeY-LIEGSPSSGAPPPS |
| 62 | Y-Aib-EGT-αMeF(2F)-TSD-4Pal-Aib-I-αMeL-LD-Orn-KAQ-αMeL-EFIE-αMeY-LIEGSPSSGAPPPS |
| 63 | Y-Aib-EGT-αMeF(2F)-TSD-4Pal-Aib-I-αMeL-LD-Orn-KAQ-Iva-EFIE-αMeY-LIEGSPSSGAPPPS |
| 64 | Y-Aib-EGT-αMeF(2F)-TSD-4Pal-Aib-I-αMeL-LD-Orn-KAQ-αMeL-EFIQ-αMeY-LIEGSPSSGAPPPS |
| 65 | Y-Aib-EGT-αMeF(2F)-TSD-4Pal-Aib-I-αMeL-LD-Orn-KAQ-Iva-EFIQ-αMeY-LIEGSPSSGAPPPS |
| 66 | Y-Aib-EGT-αMeF(2F)-TSD-4Pal-Aib-I-αMeL-LD-Orn-KAQ-Aib-QFIE-αMeY-LIEGSPSSGAPPPS |
| 67 | Y-Aib-EGT-αMeF(2F)-TSD-4Pal-Aib-I-αMeL-LD-Orn-KAQ-Aib-EFIQ-αMeY-LLEGSPSSGAPPPS |
| 68 | Y-Aib-EGT-αMeF(2F)-TSD-4Pal-SI-αMeL-LD-Orn-KAQ-Aib-EFIQ-αMeY-LIEGGG |
| 69 | Y-Aib-EGT-αMeF(2F)-TSD-4Pal-Aib-I-αMeL-LD-Orn-KAQ-Aib-EFIQ-αMeY-LIEGGG |
| 70 | Y-Aib-EGT-αMeF(2F)-TSD-4Pal-Aib-I-αMeL-LD-Orn-KAQ-Aib-DFIQ-αMeY-LIEGSPSSGAPPPS |
| 71 | Y-Aib-EGT-αMeF(2F)-TSD-4Pal-SI-αMeL-LD-Om-KAQ-Aib-EFIK-αMeY-LIEGSPSSGAPPPS |
| 72 | Y-Aib-EGT-αMeF(2F)-TSD-4Pal-Aib-I-αMeL-LD-Orn-KAQ-Aib-EFIK-αMeY-LIEGSPSSGAPPPS |
| 73 | Y-Aib-EGT-αMeF(2F)-TSDYSI-αMeL-LD-Orn-KAQ-Aib-EFIE-αMeY-LIEGSPSSGAPPPS |
| 74 | Y-Aib-EGT-αMeF(2F)-TSDYSI-αMeL-LD-Om-KAQ-Aib-EFIQ-αMeY-LIEGSPSSGAPPPS |
| 75 | Y-Aib-EGT-αMeF(2F)-TSDY-Aib-I-αMeL-LD-Orn-KAQ-Aib-EFIE-αMeY-LIEGGG |
| 76 | H-Aib-EGT-αMeF(2F)-TSD-4Pal-SI-αMeL-LD-Orn-KAQ-Aib-EFIE-αMeY-LIEGGG |
| 77 | H-Aib-EGT-αMeF(2F)-TSD-4Pal-SI-αMeL-LD-Orn-KAQ-Aib-EFIE-αMeY-LIEGSPSSGAPPPS |
| 78 | Y-Aib-EGT-αMeF(2F)-TSD-4Pal-Aib-I-αMeL-LD-Orn-KAQ-Aib-EFIE-αMeY-LIEQGG |
| 79 | Y-Aib-EGT-αMeF(2F)-TSD-4Pal-SI-αMeL-LD-Orn-KAQ-Aib-EFIe-αMeY-LIEGGPSSGAPPPS |
| 80 | Y-Aib-EGT-αMeF(2F)-TSD-4Pal-Aib-I-αMeL-LD-Orn-KAQ-Aib-EFIe-αMeY-LIEGGPSSGAPPPS |
| 81 | Y-Aib-EGT-αMeF(2F)-TSDY-Aib-I-αMeL-LD-Orn-KAQ-Aib-EFIe-αMeY-LIEGGPSSGAPPPS |
| 82 | Y-Aib-EGT-αMeF(2F)-TSD-4Pal-SI-αMeL-LD-Orn-KAQ-Aib-EFIe-αMeY-LIAGSPSSGAPPPS |
| 83 | Y-Aib-EGT-αMeF(2F)-TSD-4Pal-Aib-I-αMeL-LD-Orn-KAQ-Aib-EFIe-αMeY-LIAGSPSSGAPPPS |
| 84 | Y-Aib-EGT-αMeF(2F)-TSDY-Aib-I-αMeL-LD-Orn-KAQ-Aib-EFIe-αMeY-LIAGSPSSGAPPPS |
| 85 | Y-Aib-EGT-αMeF(2F)-TSD-4Pal-SI-αMeL-LD-Orn-KAQ-Aib-EFIe-αMeY-LIAGGPSSGAPPPS |
| 86 | Y-Aib-EGT-αMeF(2F)-TSDY-Aib-I-αMeL-LD-Orn-KAQ-Aib-EFIe-αMeY-LIAGGPSSGAPPPS |
| 87 | Y-Aib-EGT-αMeF(2F)-TSD-4Pal-SI-αMeL-LD-Orn-KAQ-Aib-EFIe-αMeY-LVEGSPSSGAPPPS |
| 88 | Y-Aib-EGT-αMeF(2F)-TSD-4Pal-SI-αMeL-LD-Orn-KAQ-Aib-EFIE-αMeY-LIAGSPSSGAPPPS |
| 89 | Y-Aib-EGT-αMeF(2F)-TSDY-Aib-I-αMeL-LD-Orn-KAQ-Aib-EFIE-αMeY-LIAGSPSSGAPPPS |
| 90 | Y-Aib-EGT-αMeF(2F)-TSD-4Pal-SI-αMeL-LDEQAQ-Aib-EFIe-αMeY-LIEGSPSSGAPPPS |
| 91 | Y-Aib-EGT-αMeF(2F)-TSD-4Pal-Aib-I-αMeL-LDEKAQ-Aib-EFIE-αMeY-LIEGGPSSG |
| 92 | Y-Aib-EGT-αMeF(2F)-TSD-4Pal-Aib-I-αMeL-LD-Orn-KAQ-Aib-EFIQ-αMeY-LIE-Aib-SPSSGAPPPS |
| 93 | Y-Aib-QGT-αMeF(2F)-TSD-4Pal-SI-αMeL-LD-Orn-KAQ-αMe4Pal-Orn-FIe-αMeY-LIEGSPSSGAPPPS |
| 94 | Y-Aib-QGT-αMeF(2F)-TSD-4Pal-SI-αMeL-LD-Orn-KAQ-αMe4Pal-Orn-FIE-αMeY-LIEGSPSSGAPPPS |
| 95 | Y-Aib-QGT-αMeF(2F)-TSD-4Pal-αMeS-I-αMeL-LD-Orn-KAQ-αMe4Pal-Orn-FIe-αMeY-LIEGSPSSGAPPPS |
| 96 | Y-Aib-QGT-αMeF(2F)-TSD-4Pal-αMeS-I-αMeL-LD-Orn-KAQ-αMe4Pal-Orn-FIE-MeY-LIEGSPSSGAPPPS |
| 97 | Y-Aib-QGT-αMeF(2F)-TSDY-αMeS-I-αMeL-LD-Orn-KAQ-αMe4Pal-Orn-FIe-αMeY-LIEGSPSSGAPPPS |
| 98 | Y-Aib-QGT-αMeF(2F)-TSDY-αMeS-I-αMeL-LD-Orn-KAQ-αMe4Pal-Orn-FIE-αMeY-LIEGSPSSGAPPPS |
| 99 | Y-Aib-QGT-αMeF(2F)-TSD-4Pal-αMeS-I-αMeL-LD-Orn-KAQ-αMe4Pal-Orn-FIE-αMeY-LIEGGG |
| 100 | Y-Aib-QGT-αMeF(2F)-TSDY-αMeS-I-αMeL-LD-Om-KAQ-αMe4Pal-Orn-FIe-αMeY-LIEGGG |
| 101 | Y-Aib-QGT-αMeF(2F)-TSD-4Pal-αMeS-I-αMeL-LD-Orn-KAQ-αMe4Pal-Orn-FIE-αMeY-LIEGGPSSGAPPPS |
| 102 | Y-Aib-QGT-αMeF(2F)-TSDY-αMeS-I-αMeL-LD-Om-KAQ-αMe4Pal-Orn-FIe-αMeY-LIEGGPSSGAPPPS |
| 103 | Y-Aib-QGT-αMeF(2F)-TSD-4Pal-αMeS-I-αMeL-LD-Orn-KAQ-αMe4Pal-Orn-FIK-αMeY-LIEGGPSSGAPPPSGG |
| 104 | Y-Aib-QGT-αMeF(2F)-TSDY-αMeS-I-αMeL-LD-Orn-KAQ-αMe4Pal-Orn-FIK-αMeY-LIEGGPSSGAPPPSGG |
| 105 | Y-Aib-QGT-αMeF(2F)-TSDY-αMeS-I-αMeL-LD-Om-KAQ-αMe4Pal-Orn-FIKαMeY-LIEGGPSSGAPPPSGG |
| 106 | Y-Aib-QGT-αMeF(2F)-TSD-4Pal-αMeS-I-αMeL-LD-Orn-KAQ-αMe4Pal-Orn-FIE-αMeY-LIEGGPSSG |
| 107 | Y-Aib-QGT-αMeF(2F)-TSDY-αMeS-I-αMeL-LD-Orn-KAQ-αMe4Pal-Orn-FIe-αMeY-LIEGGPSSG |
| 108 | Y-Aib-QGT-αMeF(2F)-TSD-4Pal-αMeS-I-αMeL-LD-Orn-KAQ-αMe4Pal-Orn-FIe-αMeY-LIEGSPSSG |
| 109 | Y-Aib-QGT-αMeF(2F)-TSD-4Pal-αMeS-I-αMeL-LD-Orn-KAQ-αMe4Pal-Orn-FIe-αMeY-LIEGGG |
| 110 | Y-Aib-QGT-αMeF(2F)-TSD-4Pal-αMeS-I-αMeL-LD-Orn-KAQ-αMe4Pal-Orn-FIQ-QMeY-LIEGSPSSGAPPPS |
| 111 | Y-Aib-QGT-αMeF(2F)-TSDY-αMeS-I-αMeL-LD-Om-KAQ-αMe4Pal-Orn-FIQ-αMeY-LIEGSPSSGAPPPS |
| 112 | Y-Aib-QGT-αMeF(2F)-TSDY-αMeS-I-αMeL-LD-Om-KAQ-αMe4Pal-Orn-FIe-αMeY-LIE-Aib-SPSSGAPPPS |
| 113 | Y-Aib-QGT-αMeF(2F)-TSDY-αMeS-I-αMeL-LD-Om-KAQ-αMe4Pal-EFIe-αMeY-LIEGSPSSGAPPPS |
| 114 | Y-Aib-QGT-αMeF(2F)-TSDY-αMeS-I-αMeL-LD-Om-KAQ-αMe4Pal-EFIQ-αMeY-LIEGSPSSGAPPPS |
| 115 | Y-Aib-QGT-αMeF(2F)-TSDY-αMeS-I-αMeL-LD-Om-KAQ-Aib-EFIQ-αMeY-LIEGSPSSGAPPPS |
| 116 | Y-Aib-QGT-αMeF(2F)-TSDY-αMeS-I-αMeL-LD-Orn-KAQ-αMe4Pal-EFIQ-QMeY-LLEGSPSSGAPPPS |
| 117 | Y-Aib-QGT-αMeF(2F)-TSD-4Pal-SI-αMeL-LD-Orn-KAQ-αMe4Pal-Orn-FIQ-αMeY-LIEGSPSSGAPPPS |
| 118 | Y-Aib-QGT-αMeF(2F)-TSDY-αMeS-I-αMeL-LD-Orn-KAQ-αMe4Pal-Orn-FIe-αMeY-LIE-Aib-GG |
| 119 | Y-Aib-QaT-αMeF(2F)-TSDY-αMeS-I-αMeL-LD-Orn-KAQ-αMe4Pal-EFIQ-αMeY-LIEGSPSSGAPPPS |
| 120 | Y-αMeS-QGT-αMeF(2F)-TSDY-αMeS-I-αMeL-LD-Orn-KAQ-αMe4Pal-EFIQ-αMeY-LIEGSPSSGAPPPS |
| 121 | Y-Iva-QGT-αMeF(2F)-TSDY-αMeS-I-αMeL-LD-Orn-KAQ-αMe4Pal-EFIQ-αMeY-LIEGSPSSGAPPPS |
| 122 | Y-Aib-HGT-αMeF(2F)-TSDY-αMeS-I-αMeL-LD-Om-KAQ-αMe4Pal-EFIQ-αMeY-LIEGSPSSGAPPPS |
| 123 | H-Aib-HGT-αMeF(2F)-TSDY-αMeS-I-αMeL-LD-Orn-KAQ-αMe4Pal-EFIQ-αMeY-LIEGSPSSGAPPPS |
| 124 | H-Aib-HGT-αMeF(2F)-TSDY-αMeS-I-αMeL-LD-Om-KAQ-Aib-EFIQ-αMeY-LIEGSPSSGAPPPS |
| 125 | H-Aib-HGT-αMeF(2F)-TSD-4Pal-αMeS-I-αMeL-LD-Orn-KAQ-αMe4Pal-EFIQ-αMeY-LIEGSPSSGAPPPS |
| 126 | H-Aib-HGT-αMeF(2F)-TSD-4Pal-SI-αMeL-LD-Orn-KAQ-αMe4Pal-EFIQ-αMeY-LIEGSPSSGAPPPS |
| 127 | Y-Aib-QGT-αMeF(2F)-TSDY-αMeS-I-αMeL-LD-Orn-KAQ-αMe4Pal-EFIQ-αMeY-LIE-Aib-SPSSGAPPPS |
| 128 | Y-Aib-QGT-αMeF(2F)-TSDY-αMeS-I-αMeL-LD-Orn-KAQ-αMe4Pal-EFIE-αMeY-LIEGSPSSGAPPPS |
| 129 | Y-Aib-QGT-αMeF(2F)-TSD-4Pal-αMeS-I-αMeL-LD-Orn-KAQ-αMe4Pal-EFIQ-αMeY-LIEGSPSSGAPPPS |
| 130 | Y-Aib-QGT-αMeF(2F)-TSD-4Pal-αMeS-I-αMeL-LD-Orn-KAQ-αMe4Pal-EFIE-αMeY-LIEGSPSSGAPPPS |
| 131 | Y-Aib-QGT-αMeF(2F)-TSDY-αMeS-I-αMeL-LD-Om-KAQ-αMe4Pal-EFIE-αMeY-LIE-Aib-SPSSGAPPPS |
| 132 | Y-Aib-QGT-αMeF(2F)-TSD-4Pal-αMeS-I-αMeL-LD-Orn-KAQ-αMe4Pal-EFIQ-αMeY-LIE-Aib-SPSSGAPPPS |
| 133 | Y-Aib-QGT-αMeF(2F)-TSD-4Pal-αMeS-I-αMeL-LD-Orn-KAQ-αMe4Pal-EFIE-αMeY-LIE-Aib-SPSSGAPPPS |
| 134 | Y-Aib-QGT-αMeF(2F)-TSDY-αMeS-I-αMeL-LDEKAQ-αMe4Pal-EFIQ-αMeY-LLEGSPSSGAPPPS |
| 135 | Y-Aib-QGT-αMeF(2F)-TSDY-αMeS-I-αMeL-LDEKAQ-αMe4Pal-EFIQ-αMeY-LLE-Aib-SPSSGAPPPS |
| 136 | H-Aib-QGT-αMeF(2F)-TSDY-αMeS-I-αMeL-LD-Om-KAQ-αMe4Pal-EFIQ-αMeY-LIEGSPSSGAPPPS |
| 137 | Y-Aib-QGT-αMeF(2F)-TSDY-αMeS-I-αMeL-LD-Orn-KAQ-αMe4Pal-EFIQ-αMeY-LVEGSPSSGAPPPS |
| 138 | Y-Aib-QGT-αMeF(2F)-TSDY-αMeS-I-αMeL-LD-Om-KAQ-αMe4Pal-EFIQ-αMeY-LIEGGG |
| 139 | H-Aib-HGT-αMeF(2F)-TSDY-αMeS-I-αMeL-LD-Om-KAQ-Aib-EFIQ-αMeY-LLEGSPSSGAPPPS |
| 140 | H-Aib-HGT-αMeF(2F)-TSD-4Pal-SI-αMeL-LD-Orn-KAQ-αMe4Pal-EFIQ-αMeY-LLEGSPSSGAPPPS |
| 141 | Y-Aib-QGT-αMeF(2F)-TSDY-αMeS-I-αMeL-LD-Om-KAQ-αMe4Pal-DFIQ-αMeY-LIEGSPSSGAPPPS |
| 142 | Y-Aib-QGT-αMeF(2F)-TSDY-αMeS-I-αMeL-LD-Om-KAQ-αMe4Pal-Orn-FIE-αMeY-LIA-Aib-SPSSGAPPPS |
| 143 | Y-Aib-QGT-αMeF(2F)-TSDY-αMeS-I-αMeL-LD-Om-KAQ-αMe4Pal-EFIQ-αMeY-LLE-Aib-SPSSGAPPPS |
| 144 | H-Aib-QGT-αMeF(2F)-TSDY-αMeS-I-αMeL-LD-Om-KAQ-αMe4Pal-EFIE-αMeY-LIEGSPSSGAPPPS |
| 145 | H-Aib-QGT-αMeF(2F)-TSDY-αMeS-I-αMeL-LD-Om-KAQ-αMe4Pal-EFIE-αMe Y-LIE-Aib-SPSSGAPPPS |
| 146 | H-Aib-QGT-αMeF(2F)-TSDY-αMeS-I-αMeL-LD-Orn-KAQ-αMe4Pal-EFIE-αMeY-LLEGSPSSGAPPPS |
| 147 | H-Aib-QGT-αMeF(2F)-TSDY-αMeS-I-αMeL-LD-Orn-KAQ-αMe4Pal-EFIE-αMeY-LLE-Aib-SPSSGAPPPS |
| 148 | H-Aib-QGT-αMeF(2F)-TSDY-αMeS-I-αMeL-LD-Om-KAQ-αMe4Pal-EFIQ-αMeY-LIE-Aib-SPSSGAPPPS |
| 149 | H-Aib-QGT-αMeF(2F)-TSDY-αMeS-I-αMeL-LD-Orn-KAQ-αMe4Pal-EFIQ-αMeY-LLE-Aib-SPSSGAPPPS |
| 150 | Y-αMeS-QGT-αMeF(2F)-TSDY-αMeS-I-αMeL-LD-Orn-KAQ-αMe4Pal-EFIE-αMeY-LIEGSPSSGAPPPS |
| 151 | Y-Iva-QGT-αMeF(2F)-TSDY-αMeS-I-αMeL-LD-Orn-KAQ-αMe4Pal-EFIE-αMeY-LIEGSPSSGAPPPS |
| 152 | Y-Ac4c-QGT-αMeF(2F)-TSDY-αMeS-I-αMeL-LD-Orn-KAQ-αMe4Pal-EFIE-αMeY-LIEGSPSSGAPPPS |
| 153 | H-Aib-QGT-αMeF(2F)-TSDY-αMeS-I-αMeL-LD-Orn-KAQ-αMe4Pal-Orn-FIK-αMeY-LLEGSPSSGAPPPS |
| 154 | H-Aib-QGT-αMeF(2F)-TSDY-αMeS-I-αMeL-LD-Om-KAQ-αMe4Pal-EFIKαMeY-LLEGSPSSGAPPPS |
| 155 | H-Aib-QGT-αMeF(2F)-TSDY-αMeS-I-αMeL-LD-Om-KAQ-αMe4Pal-Orn-FIe-αMe Y-LIEGSPSSGAPPPS |
| 156 | H-Aib-QGT-αMeF(2F)-TSDY-αMeS-I-αMeL-LD-Om-KAQ-αMe4Pal-Orn-FIe-αMeY-LLEGSPSSGAPPPS |
| 157 | H-Aib-QGT-αMeF(2F)-TSDY-αMeS-I-αMeL-LD-Om-KAQ-αMe4Pal-Orn-FIE-αMeY-LIEGSPSSGAPPPS |
| 158 | H-Aib-QGT-αMeF(2F)-TSDY-αMeS-I-αMeL-LD-Om-KAQ-αMe4Pal-Orn-FIE-αMeY-LLEGSPSSGAPPPS |
| 159 | Y-Aib-QGT-αMeF(2F)-TSDY-αMeS-I-αMeL-LD-Om-KAQ-αMe4Pal-EFIE-αMeY-LLEGSPSSGAPPPS |
| 160 | Y-Aib-QGT-αMeF(2F)-TSDY-αMeS-I-αMeL-LD-Om-KAQ-αMe4Pal-EFIe-αMeY-LLEGSPSSGAPPPS |
| 161 | Y-Aib-QGT-αMeF(2F)-TSDY-αMeS-I-αMeL-LD-Orn-KAQ-αMe4Pal-Orn-FIE-αMeY-LLEGSPSSGAPPPS |
| 162 | Y-Aib-QGT-αMeF(2F)-TSDY-αMeS-I-αMeL-LD-Om-KAQ-αMe4Pal-Orn-FIe-αMeY-LLEGSPSSGAPPPS |
| 163 | Y-Aib-QGT-αMeF(2F)-TSDY-αMeS-I-αMeL-LD-Orn-KAQ-Aib-QFIE-αMeY-LLEGSPSSGAPPPS |
| 164 | Y-Aib-QGT-αMeF(2F)-TSDY-αMeS-I-αMeL-LD-Orn-KAQ-Aib-Orn-FIe-αMeY-LLEGSPSSGAPPPS |
| 165 | Y-Aib-QGT-αMeF(2F)-TSDY-αMeS-I-αMeL-LD-Orn-KAQ-Aib-Orn-FIE-αMeY-LLEGSPSSGAPPPS |
| 166 | Y-Aib-QGT-αMeF(2F)-TSDY-αMeS-I-αMeL-LD-Orn-KAQ-Aib-Orn-FIq-αMeY-LLEGSPSSGAPPPS |
| 167 | Y-Aib-QGT-αMeF(2F)-TSDY-αMeS-I-αMeL-LD-Orn-KAQ-Aib-Orn-FIQ-αMeY-LLEGSPSSGAPPPS |
| 168 | Y-Aib-QGT-αMeF(2F)-TSDY-αMeS-I-αMeL-LD-Om-KAQ-Aib-EFIe-αMeY-LLEGSPSSGAPPPS |
| 169 | Y-Aib-QGT-αMeF(2F)-TSDY-αMeS-I-αMeL-LD-Om-KAQ-Aib-EFIE-αMeY-LLEGSPSSGAPPPS |
| 170 | Y-Aib-QGT-αMeF(2F)-TSDY-αMeS-I-αMeL-LD-Orn-KAQ-Aib-EFIq-αMeY-LLEGSPSSGAPPPS |
| 171 | H-Ac4c-QGT-αMeF(2F)-TSDY-αMeS-I-αMeL-LD-Orn-KAQ-αMe4Pal-EFIE-αMeY-LIEGSPSSGAPPPS |
| 172 | YaQGT-αMeF(2F)-TSDY-αMeS-I-αMeL-LD-Orn-KAQ-αMe4Pal-EFIE-αMeY-LIEGSPSSGAPPPS |
| 173 | YaQGT-αMeF(2F)-TSDY-αMeS-I-αMeL-LD-Orn-KAQ-αMe4Pal-Orn-FIE-αMeY-LIEGSPSSGAPPPS |
| 174 | YaQGT-αMeF(2F)-TSDY-αMeS-I-αMeL-LD-Orn-KAQ-αMe4Pal-Orn-FIe-αMeY-LIEGSPSSGAPPPS |
| 175 | YaQGT-αMeF(2F)-TSDY-αMeS-I-αMeL-LD-Om-KAQ-αMe4Pal-EFIE-αMeY-LLEGSPSSGAPPPS |
| 176 | YaQGT-αMeF(2F)-TSDY-αMeS-I-αMeL-LD-Orn-KAQ-αMe4Pal-EFIe-αMeY-LLEGSPSSGAPPPS |
| 177 | YaQGT-αMeF(2F)-TSDY-αMeS-I-αMeL-LD-Orn-KAQ-αMe4Pal-Orn-FIE-αMeY-LLEGSPSSGAPPPS |
| 178 | YaQGT-αMeF(2F)-TSDY-αMeS-I-αMeL-LD-Orn-KAQ-Aib-Orn-FIq-αMeY-LLEGSPSSGAPPPS |
| 179 | YaQGT-αMeF(2F)-TSDY-αMeS-I-αMeL-LD-Orn-KAQ-Aib-Orn-FIQ-αMeY-LLEGSPSSGAPPPS |
| 180 | YaQGT-αMeF(2F)-TSDY-αMeS-I-αMeL-LD-Orn-KAQ-Aib-Orn-FIE-αMeY-LIEGSPSSGAPPPS |
| 181 | Y-Aib-QGT-αMeF(2F)-TSD-4Pal-SI-αMeL-LD-Orn-KAQ-αMe4Pal-EFIE-αMeY-LIEGSPSSGAPPPS |
| 182 | Y-Aib-QGT-αMeF(2F)-TSDY-αMeS-I-αMeL-LD-Om-KAQ-Aib-Orn-FIE-αMeY-LIEGSPSSGAPPPS |
| 183 | Y-Aib-QGT-αMeF(2F)-TSD-4Pal-αMeS-I-αMeL-LD-Orn-KAQ-αMe4Pal-EFIe-αMeY-LIEGSPSSGAPPPS |
| 184 | Y-Aib-QGT-αMeF(2F)-TSDY-αMeS-I-αMeL-LD-Om-KAQ-Aib-Orn-FIe-αMeY-LIEGSPSSGAPPPS |
| 185 | NMeY-Aib-QGT-αMeF(2F)-TSDY-αMeS-I-αMeL-LD-Orn-KAQ-αMe4Pal-EFIE-αMeY-LIEGSPSSGAPPPS |
| 186 | Y-Aib-QGT-αMeF(2F)-TSDY-αMeS-I-αMeL-LD-Orn-KAQ-αMe4Pal-Orn-FIQ-αMeY-LIE-Aib-SPSSGAPPPS |
| 996 | Y-Aib-EGT-αMeF(2F)-TSD-4Pal-Aib-I-αMeL-LD-Orn-QAQ-Aib-EFIe-αMeY-LIEGGG |
| 997 | Y-Aib-EGT-αMeF(2F)-TSD-Y-Aib-I-αMeL-LD-Orn-KAQ-Aib-Orn-FIE-αMeY-LIEGSPSSGAPPPS |
| 998 | Y-Aib-EGT-αMeF(2F)-TSDY-Aib-I-αMeL-LD-Orn-KAQ-Aib-EFIE-αMeY-LIAGGG |
| 999 | Y-Aib-EGT-αMeF(2F)-TSDY-Aib-I-αMeL-LD-Orn-KAQ-Aib-EFIE-αMeY-LIE-Aib-GG |
| 1000 | Y-Aib-QGT-αMeF(2F)-TSDY-αMeS-I-αMeL-LD-Orn-KAQ-αMe4Pal-Orn-FIE-αMeY-LVEGSPSSGAPPPS |
| 1001 | Y-Aib-QGT-αMeF(2F)-TSD-4Pal-αMeS-I-αMeL-LD-Orn-KAQ-αMe4Pal-Orn-FIE-αMeY-LVEGSPSSGAPPPS |
| 1002 | Y-Aib-QGT-αMeF(2F)-TSDY-αMeS-I-αMeL-LD-Orn-KAQ-αMe4Pal-EFIE-αMeY-L VEGSPSSGAPPPS |
| 1003 | YaQGT-αMeF(2F)-TSD-4Pal-αMeS-I-QMeL-LD-Orn-KAQ-αMe4Pal-Orn-FIE-αMeY-LIEGSPSSGAPPPS |
| 1004 | YaQGT-αMeF(2F)-TSD-4Pal-SI-αMeL-LD-Orn-KAQ-αMe4Pal-Orn-FIE-αMeY-LIEGSPSSGAPPPS |
| 1005 | YaQGT-αMeF(2F)-TSDY-αMeS-I-αMeL-LD-Orn-KAQ-αMe4Pal-Orn-FIE-αMeY-LIEQSPSSGAPPPS |
| 1006 | Y-αMeS-QGT-αMeF(2F)-TSDY-αMeS-I-αMeL-LD-Om-KAQ-αMe4Pal-Orn-FIE-αMeY-LIEGSPSSGAPPPS |
| 1007 | Y-αMeS-QGT-αMeF(2F)-TSD-4Pal-αMeS-I-αMeL-LD-Om-KAQ-αMe4Pal-Orn-FIE-αMeY-LIEGSPSSGAPPPS |
| 1008 | Y-Iva-QGT-αMeF(2F)-TSDY-αMeS-I-αMeL-LD-Orn-KAQ-αMe4Pal-Orn-FIE-αMeY-LIEGSPSSGAPPPS |
| 1009 | Y-Iva-QGT-αMeF(2F)-TSD-4Pal-αMeS-I-αMeL-LD-Orn-KAQ-αMe4Pal-Orn-FIE-αMeY-LIEGSPSSGAPPPS |
| 1010 | Y-Ac4c-QGT-αMeF(2F)-TSD-4Pal-αMeS-I-αMeL-LD-Orn-KAQ-αMe4Pal-EFIE-αMeY-LIEGSPSSGAPPPS |
| 1011 | Y-Aib-QGT-αMeF(2F)-TSDY-αMeS-I-αMeL-LD-Orn-KAQ-αMeL-Orn-FIe-αMeY-LIEGSPSSGAPPPS |
| 1012 | Y-Aib-QGT-αMeF(2F)-TSDY-αMeS-I-αMeL-LD-Orn-KAQ-αMeL-Iva-FIe-αMeY-LIEGSPSSGAPPPS |
| 1013 | Y-Aib-QGT-αMeF(2F)-TSD-4Pal-αMeS-I-αMeL-LD-Om-KAQ-αMeL-Orn-FIe-αMeY-LIEGSPSSGAPPPS |
| 1014 | Y-Aib-QGT-αMeF(2F)-TSD-4Pal-αMeS-I-αMeL-LD-Orn-KAQ-αMeL-Iva-FIe-αMeY-LIEGSPSSGAPPPS |
| 1015 | Y-Aib-QGT-αMeF(2F)-TSDY-αMeS-I-αMeL-LD-Orn-KAQ-αMe4Pal-EFIE-αMeY-LIAGSPSSGAPPPS |
| 1016 | Y-Aib-QGT-αMeF(2F)-TSDY-αMeS-I-αMeL-LD-Orn-KAQ-αMe4Pal-EFIE-αMeY-LIEaSPSSGAPPPS |
| 1017 | Y-Aib-QGT-αMeF(2F)-TSDY-αMeS-I-αMeL-LD-Orn-KAQ-αMe4Pal-EFIe-αMeY-LIAGSPSSGAPPPS |
| 1018 | YaQGT-αMeF(2F)-TSDY-αMeS-I-αMeL-LD-Orn-KAQ-αMe4Pal-Orn-FIE-αMeY-LIAGSPSSGAPPPS |
| 1019 | Y-Aib-QGT-αMeF(2F)-TSDY-αMeS-I-αMeL-LD-Orn-KAQ-Aib-Orn-FIe-αMeY-LIAGSPSSGAPPPS |
| 1020 | YaQGT-αMeF(2F)-TSDY-αMeS-I-αMeL-LD-Orn-KAQ-αMe4Pal-Orn-FIE-QMeY-LIEaSPSSGAPPPS |
| 1021 | Y-Aib-QGT-αMeF(2F)-TSDY-αMeS-I-αMeL-LD-Orn-KAQ-αMe4Pal-SFIE-αMeY-LIEGSPSSGAPPPS |
| 1022 | Y-Aib-QGT-αMeF(2F)-TSDY-αMeS-I-αMeL-LD-Orn-KAQ-Aib-SFIE-αMeY-LIEGSPSSGAPPPS |
| 1023 | Y-Aib-QGT-αMeF(2F)-TSDY-αMeS-I-αMeL-LD-Orn-KAQ-4Pal-AFIE-αMeY-LIEGSPSSGAPPPS |
| 1024 | Y-Aib-QGT-αMeF(2F)-TSDY-αMeS-I-αMeL-LD-Orn-KAQ-αMeF-Aib-FIe-αMeY-LIEGSPSSGAPPPS |
| 1025 | Y-Aib-QGT-αMeF(2F)-TSDY-αMeS-I-αMeL-LD-Orn-KAQ-Iva-AFIe-αMeY-LIEGSPSSGAPPPS- |
| 1026 | Y-Aib-QGT-αMeF(2F)-TSDY-αMeS-I-αMeL-LD-Orn-KAQ-Aib-EFIE-αMeY-LIEGSPSSGAPPPS |
| 1027 | Y-Aib-QGT-αMeF(2F)-TSDY-αMeS-I-αMeL-LD-Orn-KAQ-αMe4Pal-EFIe-αMeY-LIE-Aib-SPSSGAPPPS |
| 1028 | Y-Aib-QGT-αMeF(2F)-TSDY-αMeS-I-αMeL-LD-Orn-KAQ-αMeL-Orn-FIe-αMeY-LIAaSPSSGAPPPS- |
| 1029 | Y-Aib-QGT-αMeF(2F)-TSD-4Pal-αMeS-I-αMeL-LD-Orn-KAQ-αMe4Pal-EFIE-αMeY-LIAGSPSSGAPPPS |
| 1030 | Y-Aib-QGT-αMeF(2F)-TSD-4Pal-αMeS-I-αMeL-LD-Orn-KAQ-αMe4Pal-EFIE-αMeY-LIAaSPSSGAPPPS |
| 1031 | Y-Aib-QGT-αMeF(2F)-TSD-4Pal-αMeS-I-αMeL-LD-Orn-KAQ-αMeL-Iva-FIe-αMeY-LIA-Aib-SPSSGAPPPS |
| 1032 | Y-Aib-QGT-αMeF(2F)-TSD-4Pal-αMeS-I-αMeL-LD-Orn-KAQ-αMe4Pal-SFIE-αMeY-LIEGSPSSGAPPPS |
| 1033 | Y-Aib-QGT-αMeF(2F)-TSD-4Pal-αMeS-I-αMeL-LD-Orn-KAQ-αMe4Pal-SFIE-αMeY-LIE-Aib-SPSSGAPPPS |
| 1034 | Y-Aib-QGT-αMeF(2F)-TSDY-αMeS-I-αMeL-LD-Orn-KAQ-αMe4Pal-EFIE-αMeY-LIEGGG |
| 1035 | Y-Aib-QGT-αMeF(2F)-TSDY-αMeS-I-αMeL-LD-Orn-KAQ-αMe4Pal-EFIE-αMeY-LIAGGG |
| 1036 | Y-Aib-QGT-αMeF(2F)-TSDY-αMeS-I-αMeL-LD-Orn-KAQ-αMe4Pal-EFIe-αMeY-LIEGGG |
| 1037 | Y-Ac4c-QGT-αMeF(2F)-TSDY-αMeS-I-αMeL-LD-Orn-KAQ-αMe4Pal-EFIE-αMeY-LIEGGG |
| 1038 | Y-Aib-QGT-αMeF(2F)-TSD-4Pal-αMeS-I-αMeL-LD-Orn-KAQ-αMe4Pal-EFIE-αMeY-LIEGGG |

### Acylation of Therapeutic Polypeptides

[0360] As noted before, in some embodiments, certain polypeptides described herein include an albumin-binding moiety, such as a fatty acid moiety conjugated, for example, by way of a direct bond or a linker to a natural or non-natural amino acid with a functional group available for conjugation. Such a conjugation is sometimes referred to as acylation. In certain instances, the amino acid with a functional group available for conjugation can be K, C, E or D. In particular instances, the amino acid with a functional group available for conjugation is K, where the conjugation is to an epsilon-amino group of a K sidechain.

[0361] In some embodiments, the polypeptides described herein utilize a C₁₆-C₂₂ fatty acid chemically conjugated to the functional group of an amino acid either via a direct bond or via a linker. The length and composition of the fatty acid impacts half-life of the polypeptides, their potency in in vivo animal models, and their solubility and stability. Conjugation to a C₁₆-C₂₂ saturated fatty monoacid or diacid results in polypeptides that exhibit desirable half-life, desirable potency in in vivo animal models, and desirable solubility and stability characteristics.

[0362] Examples of saturated C₁₆-C₂₂ fatty acids for use herein include, but are not limited to, palmitic acid (hexadecanoic acid) (C₁₆ monoacid), hexadecanedioic acid (C₁₆ diacid), margaric acid (heptadecanoic acid)(C₁₇ monoacid), heptadecanedioic acid (C₁₇ diacid), stearic acid (Cis monoacid), octadecanedioic acid (C₁₈ diacid), nonadecylic acid (nonadecanoic acid)(C₁₉ monoacid), nonadecanedioic acid (C₁₉ diacid), arachidic acid (eicosanoic acid)(C₂₀ monoacid), eicosanedioic acid (C₂₀ diacid), heneicosylic acid (heneicosanoic acid)(C₂₁ monoacid), heneicosanedioic acid (C₂₁ diacid), behenic acid (docosanoic acid)(C₂₂ monoacid), docosanedioic acid (C₂₂ diacid), including branched and substituted derivatives thereof.

[0363] In certain instances, the C₁₆-C₂₂ fatty acid can be a saturated C₁₈ monoacid, a saturated C₁₈ diacid, a saturated C₁₉ monoacid, a saturated C₁₉ diacid, a saturated C₂₀ monoacid, a saturated C₂₀ diacid, and branched and substituted derivatives thereof. In more particular instances, the C₁₆-C₂₂ fatty acid can be octadecanedioic (C₁₈ diacid) or eicosanedioic acid (C₂₀ diacid).

[0364] In some embodiments, a lysine at position 17 is conjugated to the fatty acid. In some embodiments the fatty acid is a C₁₆-C₂₂ fatty acid.

[0365] In some embodiments, the therapeutic polypeptide is conjugated to the fatty acid by way of a linker. In some embodiments, the linker comprises one to five amino acids. In instances in which the linker includes at least one amino acid, the amino acid can be one to five Glu or γGlu amino acid residues. In some instances, the linker can include one or two or three or four or five Glu or γGlu amino acid residues, including the D-forms thereof. For example, the linker can include either one or two or three or four γGlu amino acid residues. Alternatively, the linker can include one to five amino acid residues (such as, for example, Glu or γGlu amino acids) used in combination with one to five (2-[2-(2-amino-ethoxy)-ethoxy]-acetyl) (“AEEA”) and/or one to five εK moieties. Specifically, the linker can be combinations of one to five Glu or γGlu amino acids and one to five (2-[2-(2-amino-ethoxy)-ethoxy]-acetyl) moieties, or one to five Glu or γGlu amino acids and one to five εK moieties. In some instances, the linker can be combinations of one or two or three γGlu amino acids and one or two (2-[2-(2-amino-ethoxy)-ethoxy]-acetyl) or εK moieties.

[0366] For example, in some embodiments the polypeptides described herein have linker and fatty acid components having the structure of the following formula:

(γGlu)ₐ-(2-[2-(2-amino-ethoxy)-ethoxy]-acetyl)_{b}-(γGlu)_{c}-CO—(CH₂)ₚ—CO₂H, where a is 0, 1 or 2; b is 0, 1 or 2; c is 0, 1, 2 or 3; and p is an integer between 14 to 20.

[0367] In some preferred embodiments, a is 0 or 1; b is 0, 1 or 2; c is 1, 2 or 3; and p an integer between 14 to 20.

[0368] In some embodiments, a is 0, b is 1, c is 1 or 2 and p is 16 or 18.

[0369] For example, in some embodiments, a is 0, b is 1, c is 1 and p is 16, the structure of which is depicted below.

[chemical structure]

[0370] For example, in some embodiments, a is 0, b is 1, c is 1 and p is 18, the structure of which is depicted below.

[chemical structure]

[0371] In some embodiments, a is 0, b is 1, c is 2 and p is 16, the structure of which is depicted below.

[chemical structure]

[0372] In some embodiments, a is 0, b is 1, c is 2 and p is 18, the structure of which is depicted below.

[chemical structure]

[0373] In some embodiments, a is 0, b is 2, c is 1 and p is 16 or 18.

[0374] For example, in some embodiments, a is 0, b is 2, c is 1 and p is 16, the structure of which is depicted below.

[chemical structure]

[0375] In some embodiments, a is 0, b is 2, c is 1 and p is 18, the structure of which is depicted below.

[chemical structure]

[0376] In some embodiments, a is 0, b is 0, c is 2 and p is 16 or 18.

[0377] For example, in some embodiments, a is 0, b is 0, c is 2 and p is 16, the structure of which is depicted below.

[chemical structure]

[0378] In some embodiments, a is 0, b is 0, c is 2 and p is 18, the structure of which is depicted below.

[chemical structure]

[0379] In some embodiments, a is 0, b is 0, c is 3 and p is 16 or 18.

[0380] For example, in some embodiments, a is 0, b is 0, c is 3 and p is 16, the structure of which is depicted below.

[chemical structure]

[0381] In some embodiments, a is 0, b is 0, c is 3 and p is 18, the structure of which is depicted below.

[chemical structure]

[0382] In some embodiments, a is 1, b is 1, c is 1 and p is 16 or 18.

[0383] For example, in some embodiments, a is 1, b is 1, c is 1 and p is 16, the structure of which is depicted below.

[chemical structure]

[0384] For example, in some embodiments, a is 1, b is 1, c is 1 and p is 18, the structure of which is depicted below.

[chemical structure]

[0385] In some embodiments the polypeptides described herein have linker and fatty acid components having the structure of the following formula:

(γGlu)_{d}-(εK)ₑ-(γGlu)_{f}-CO—(CH₂)_{q}—CO₂H, where d is 0, 1 or 2; e is 0, 1 or 2; f is 0, 1, 2 or 3; and q is an integer between 14 to 20.

[0386] For example, in one embodiment, d is 0; e is 2; f is 1; and q an integer between 14 to 20. In some embodiments, d is 0; e is 2; f is 1; and q is 16 or 18.

[0387] For example, in some embodiments, d is 0; e is 2; f is 1; and q is 16, the structure of which is depicted below.

[chemical structure]

[0388] For example, in some embodiments, d is 0; e is 2; f is 1; and q is 18, the structure of which is depicted below.

[chemical structure]

[0389] A nonlimiting list of exemplary acylated therapeutic polypeptides is provided below in Table 2.

TABLE 2
Therapeutic Polypeptides Conjugated to a Fatty Acid

| SEQ | |
|---|---|
| ID | Therapeutic Polypeptides |
| NO: | Conjugated to a Fatty Acid |
| 187 | Y-Aib-EGT-αMeF(2F)-TSD-4Pal-SI-αMeL-LDEK(2-[2-(2-amino-ethoxy)-ethoxy]-acetyl)₂-(γGlu)-CO-(CH₂)₁₆- |
| | CO₂H)AQ-Aib-EFIe-αMeY-LIEGSPSSGAPPPS |
| 188 | Y-Aib-EGT-αMeF(2F)-TSD-4Pal-SI-αMeL-LD-Om-K(2-[2-(2-amino-ethoxy)-ethoxy]-acetyl)₂-(γGlu)-CO- |
| | (CH₂)₁₆-CO₂H)AQ-Aib-EFIe-αMeY-LIEGSPSSGAPPPS |
| 189 | Y-Aib-EGT-αMeF(2F)-TSD-4Pal-SI-αMeL-LDEK(2-[2-(2-amino-ethoxy)-ethoxy]-acetyl)₂-(γGlu)-CO-(CH₂)₁₆- |
| | CO₂H)AQ-Aib-EFIe-αMeY-LIEGGG |
| 190 | Y-Aib-EGT-αMeF(2F)-TSD-4Pal-SI-αMeL-LDEK(2-[2-(2-amino-ethoxy)-ethoxy]-acetyl)₂-(γGlu)-CO-(CH₂)₁₆- |
| | CO₂H)AQ-Aib-EFIE-αMeY-LIEGSPSSGAPPPS |
| 191 | Y-Aib-EGT-αMeF(2F)-TSD-4Pal-Aib-I-αMeL-LDEK(2-[2-(2-amino-ethoxy)-ethoxy]-acetyl)₂-(γGlu)-CO-(CH₂)₁₆- |
| | CO₂H)AQ-Aib-EFIE-αMeY-LIEGSPSSGAPPPS |
| 192 | Y-Aib-EGT-αMeF(2F)-TSD-4Pal-Aib-S-αMeL-LDEK(2-[2-(2-amino-ethoxy)-ethoxy]-acetyl)₂-(γGlu)-CO- |
| | (CH₂)₁₆-CO₂H)AQ-Aib-EFIE-αMeY-LIEGSPSSGAPPPS |
| 193 | Y-Aib-EGT-αMeF(2F)-TSD-4Pal-SI-αMeL-LEEK(2-[2-(2-amino-ethoxy)-ethoxy]-acetyl)₂-(γGlu)-CO-(CH₂)₁₆- |
| | CO₂H)AQ-Aib-EFIE-αMeY-LIEGSPSSGAPPPS |
| 194 | Y-Aib-EGT-αMeF(2F)-TSDV-Aib-I-αMeL-LD-EK(2-[2-(2-amino-ethoxy)-ethoxy]-acetyl)₂-(γGlu)-CO-(CH₂)₁₆- |
| | CO₂H)AQ-Aib-EFIe-αMeY-LIEGSPSSGAPPPS |
| 195 | Y-Aib-EGT-αMeF(2F)-TSDV-Aib-I-αMeL-LD-Om-K(2-[2-(2-amino-ethoxy)-ethoxy]-acetyl)₂-(γGlu)-CO- |
| | (CH₂)₁₆-CO₂H)AQ-Aib-EFIe-αMeY-LIEGSPSSGAPPPS |
| 196 | Y-Aib-EGT-αMeF(2F)-TSDV-Aib-I-αMeL-LD-Or-K(2-[2-(2-amino-ethoxy)-ethoxy]-acetyl)₂-(γGlu)-CO- |
| | (CH₂)₁₆-CO₂H)AQ-Aib-EFIE-αMeY-LIEGSPSSGAPPPS |
| 197 | Y-Aib-EGT-αMeF(2F)-TSD-4Pal-SI-αMeL-LDEK(2-[2-(2-amino-ethoxy)-ethoxy]-acetyl)₂-(γGlu)-CO-(CH₂)₁₆- |
| | CO₂H)AQ-Aib-EFIK-αMeY-LIEGSPSSGAPPPSGS |
| 198 | Y-Aib-EGT-αMeF(2F)-TSD-4Pal-SI-αMeL-LDEK(2-[2-(2-amino-ethoxy)-ethoxy]-acetyl)₂-(γGlu)-CO-(CH₂)₁₆- |
| | CO₂H)AQ-Aib-EFIe-αMeY-LIKGSPSSGAPPPSGS |
| 199 | Y-Aib-EGT-αMeF(2F)-TSD-4Pal-SI-αMeL-LDEK(2-[2-(2-amino-ethoxy)-ethoxy]-acetyl)₂-(γGlu)-CO-(CH₂)₁₆- |
| | CO₂H)AQ-Aib-EFIe-αMeY-LIEGG |
| 200 | Y-Aib-EGT-αMeF(2F)-TSD-4Pal-SI-αMeL-LDEK(2-[2-(2-amino-ethoxy)-ethoxy]-acetyl)₂-(γGlu)-CO-(CH₂)₁₆- |
| | CO₂H)AQ-Aib-EFIe-αMeY-LIEG |
| 201 | Y-Aib-EGT-αMeF(2F)-TSD-4Pal-SI-αMeL-LDEK(ϵKϵK-(γGlu)-CO-(CH₂)₁₆-CO₂H)AQ-Aib-EFIe-αMeY- |
| | LIEGSPSSGAPPPS |
| 202 | Y-Aib-EGT-αMeF(2F)-TSD-4Pal-SI-αMeL-LDEK(2-[2-(2-amino-ethoxy)-ethoxy]-acetyl)₂-(γGlu)-CO-(CH₂)₁₆- |
| | CO₂H)AQ-Aib-EFIE-αMeY-LIEGGG |
| 203 | Y-Aib-EGT-αMeF(2F)-TSD-4Pal-Aib-I-αMeL-LDEK(2-[2-(2-amino-ethoxy)-ethoxy]-acetyl)₂-(γGlu)-CO-(CH₂)₁₆- |
| | CO₂H)AQ-Aib-EFIE-αMeY-LIEGGG |
| 204 | Y-Aib-EGT-αMeF(2F)-TSD-4Pal-SI-αMeL-LEEK(2-[2-(2-amino-ethoxy)-ethoxy]-acetyl)₂-(γGlu)-CO-(CH₂)₁₆- |
| | CO₂H)AQ-Aib-EFIE-αMeY-LIEGGG |
| 205 | Y-Aib-EGT-αMeF(2F)-TSD-V-Aib-I-αMeL-LDEK(2-[2-(2-amino-ethoxy)-ethoxy]-acetyl)₂-(γGlu)-CO-(CH₂)₁₆- |
| | CO₂H)AQ-Aib-EFIe-αMeY-LIEGGG |
| 206 | Y-Aib-EGT-αMeF(2F)-TSD-V-Aib-I-αMeL-LD-Orn-K(2-[2-(2-amino-ethoxy)-ethoxy]-acety1)₂-(γGlu)-CO- |
| | (CH₂)₁₆-CO₂H)AQ-Aib-EFIe-αMeY-LIEGGG |
| 207 | Y-Aib-EGT-αMeF(2F)-TSD-V-Aib-I-αMeL-LD-Om-K(2-[2-(2-amino-ethoxy)-ethoxy]-acetyl)₂-(γGlu)-CO- |
| | (CH₂)₁₆-CO₂H)AQ-Aib-EFIE-αMeY-LIEGGG |
| 208 | Y-Aib-EGT-αMeF(2F)-TSD-4Pal-SI-αMeL-LD-Or-K(2-[2-(2-amino-ethoxy)-ethoxy]-acetyl)₂-(γGlu)-CO- |
| | (CH₂)₁₆-CO₂H)AQ-Aib-EFIE-αMeY-LIEGGG |
| 209 | Y-Aib-EGT-αMeF(2F)-TSD-4Pal-Aib-I-αMeL-LD-Om-K(2-[2-(2-amino-ethoxy)-ethoxy]-acetyl)₂-(γGlu)-CO- |
| | (CH₂)₁₆-CO₂H)AQ-Aib-EFIE-αMeY-LIEGGG |
| 210 | Y-Aib-EGT-αMeF(2F)-TSD-4Pal-SI-αMeL-LE-Orn-K(2-[2-(2-amino-ethoxy)-ethoxy]-acetyl)₂-(γGlu)-CO- |
| | (CH₂)₁₆-CO₂H)AQ-Aib-EFIE-αMeY-LIEGGG |
| 211 | Y-Aib-EGT-αMeF(2F)-TSD-4Pal-SI-αMeL-LDEK(2-[2-(2-amino-ethoxy)-ethoxy]-acetyl)₂-(γGlu)-CO-(CH₂)₁₆- |
| | CO₂H)AQ-Aib-EFIE-αMeY-LIKGSPSSGAPPPSGS |
| 212 | Y-Aib-EGT-αMeF(2F)-TSD-4Pal-SI-αMeL-LE-Orn-K(2-[2-(2-amino-ethoxy)-ethoxy]-acetyl)₂-(γGlu)-CO- |
| | (CH₂)₁₆-CO₂H)AQ-Aib-EFIE-αMeY-LIEGSPSSGAPPPS |
| 213 | Y-Aib-EGT-αMeF(2F)-TSD-4Pal-Aib-I-αMeL-LE-Or-K(2-[2-(2-amino-ethoxy)-ethoxy]-acetyl)₂-(γGlu)-CO- |
| | (CH₂)₁₆-CO₂H)AQ-Aib-EFIE-αMeY-LIEGGG |
| 214 | Y-Aib-EGT-αMeF(2F)-TSD-4Pal-Aib-I-αMeL-LD-Or-K(2-[2-(2-amino-ethoxy)-ethoxy]-acetyl)₂-(γGlu)-CO- |
| | (CH₂)₁₆-CO₂H)AQ-Aib-EFIe-αMeY-LIEGGG |
| 215 | Y-Aib-EGT-αMeF(2F)-TSD-4Pal-SI-αMeL-LD-Om-K(2-[2-(2-amino-ethoxy)-ethoxy]-acetyl)₂-(γGlu)-CO- |
| | (CH₂)₁₆-CO₂H)AQ-Aib-EFIK-αMeY-LIEGSPSSGAPPPSGS |
| 216 | Y-Aib-EGT-αMeF(2F)-TSD-4Pal-Aib-I-αMeL-LD-Or-K(2-[2-(2-amino-ethoxy)-ethoxy]-acetyl)₂-(γGlu)-CO- |
| | (CH₂)₁₆-CO₂H)AQ-Aib-EFIK-αMeY-LIEGSPSSGAPPPSGS |
| 217 | Y-Aib-EGT-αMeF(2F)-TSD-4Pal-Aib-I-αMeL-LD-Or-K(ϵKϵK-(γGlu)-CO-(CH₂)₁₆-CO₂H)AQ-Aib-EFIE-αMeY- |
| | LIEGGPSSGAPPPSG |
| 218 | Y-Aib-EGT-αMeF(2F)-TSD-4Pal-Aib-I-αMeL-LD-Or-K(ϵKϵK-(γGlu)-CO-(CH₂)₁₆-CO₂H)AQ-Aib-EFIE-αMeY- |
| | LIEGGESSGAPPPSG |
| 219 | Y-Aib-EGT-αMeF(2F)-TSD-4Pal-Aib-I-αMeL-LD-Om-K(ϵKϵK-(γGlu)-CO-(CH₂)₁₆-CO₂H)AQ-Aib-EFIE-αMeY- |
| | LIEGG-Om-SSGAPPPSG |
| 220 | Y-Aib-EGT-αMeF(2F)-TSD-4Pal-Aib-I-αMeL-LD-Or-K(ϵKϵK-(γGlu)-CO-(CH₂)₁₆-CO₂H)AQ-Aib-EFIE-αMeY- |
| | LIEGGPPSGAPPPSG |
| 221 | Y-Aib-EGT-αMeF(2F)-TSD-4Pal-Aib-I-αMeL-LD-Orn-K(ϵKϵK-(γGlu)-CO-(CH₂)₁₆-CO₂H)AQ-Aib-EFIE-αMeY- |
| | LIEGGPPS-Aib-Orn-PPP-Orn-G |
| 222 | Y-Aib-EGT-αMeF(2F)-TSD-4Pal-Aib-I-αMeL-LD-Or-K(ϵKϵK-(γGlu)-CO-(CH₂)₁₆-CO₂H)AQ-Aib-EFIE-αMeY- |
| | LIEGSPSSGAPPPGG |
| 223 | Y-Aib-EGT-αMeF(2F)-TSD-4Pal-Aib-I-αMeL-LD-Or-K(ϵKϵK-(γGlu)-CO-(CH₂)₁₆-CO₂H)AQ-Aib-EFIK-αMeY- |
| | LIEGGPSSGAPPPSGG |
| 224 | Y-Aib-EGT-αMeF(2F)-TSD-4Pal-Aib-I-αMeL-LD-Orn-K(ϵKϵK-(γGlu)-CO-(CH₂)₁₆-CO₂H)AQ-Aib-EFIK-αMeY- |
| | LIEGGESSGAPPPSGG |
| 225 | Y-Aib-EGT-αMeF(2F)-TSD-4Pal-Aib-I-αMeL-LD-Or-K(ϵKϵK-(γGlu)-CO-(CH₂)₁₆-CO₂H)AQ-Aib-EFIK-αMeY- |
| | LIEGG-Orn-SSGAPPPSGG |
| 226 | Y-Aib-EGT-αMeF(2F)-TSD-4Pal-Aib-I-αMeL-LD-Orn-K(ϵKϵK-(γGlu)-CO-(CH₂)₁₆-CO₂H)AQ-Aib-EFIK-αMeY- |
| | LIEGGPPSGAPPPSGG |
| 227 | Y-Aib-EGT-αMeF(2F)-TSD-4Pal-Aib-I-αMeL-LD-Om-K(ϵKϵK-(γGlu)-CO-(CH₂)₁₆-CO₂H)AQ-Aib-EFIK-αMeY- |
| | LIEGGPPS-Aib-Orn-PPP-Or-GG |
| 228 | Y-Aib-EGT-αMeF(2F)-TSD-4Pal-Aib-I-αMeL-LD-Or-K(ϵKϵK-(γGlu)-CO-(CH₂)₁₆-CO₂H)AQ-Aib-EFIK-αMeY- |
| | LIEGSPSSGAPPPGGG |
| 229 | Y-Aib-EGT-αMeF(2F)-TSD-4Pal-Aib-I-αMeL-LD-Om-K(ϵKϵK-(γGlu)-CO-(CH₂)₁₆-CO₂H)AQ-Aib-EFIE-αMeY- |
| | LIEGGG |
| 230 | Y-Aib-EGT-αMeF(2F)-TSD-4Pal-Aib-I-αMeL-LD-Or-K(ϵKϵK-(γGlu)-CO-(CH₂)₁₆-CO₂H)AQ-Aib-EFIE-αMeY- |
| | LIEGGPSSG |
| 231 | Y-Aib-EGT-αMeF(2F)-TSD-4Pal-Aib-I-αMeL-LD-Om-K(ϵKϵK-(γGlu)-CO-(CH₂)₁₆-CO₂H)AQ-Aib-EFIK-αMeY- |
| | LIEGGG |
| 232 | Y-Aib-EGT-αMeF(2F)-TSD-4Pal-Aib-I-αMeL-LD-Or-K(ϵKϵK-(γGlu)-CO-(CH₂)₁₆-CO₂H)AQ-Aib-EFIK-αMeY- |
| | LIEGGPSSG |
| 233 | Y-Aib-EGT-αMeF(2F)-TSD-4Pal-Aib-I-αMeL-LD-Orn-K(ϵKϵK-(γGlu)-CO-(CH₂)₁₆-CO₂H)AQ-Aib-EFIE-αMeY- |
| | LIKGGG |
| 234 | Y-Aib-EGT-αMeF(2F)-TSD-4Pal-Aib-I-αMeL-LD-Or-K(ϵKϵK-(γGlu)-CO-(CH₂)₁₆-CO₂H)AQ-Aib-EFIE-αMeY- |
| | LIKGGPSSG |
| 235 | Y-Aib-EGT-αMeF(2F)-TSD-4Pal-Aib-I-αMeL-LD-Orn-K(2-[2-(2-amino-ethoxy)-ethoxy]-acetyl)₂-(γGlu)-CO- |
| | (CH₂)₁₆-CO₂H)AQ-Aib-EFIK-αMeY-LIEGGG |
| 236 | Y-Aib-EGT-αMeF(2F)-TSD-4Pal-Aib-I-αMeL-LD-Or-K(2-[2-(2-amino-ethoxy)-ethoxy]-acetyl)₂-(γGlu)-CO- |
| | (CH₂)₁₆-CO₂H)AQ-Aib-EFIK-αMeY-LIEGGPSSG |
| 237 | Y-Aib-EGT-αMeF(2F)-TSD-4Pal-Aib-I-αMeL-LD-Orn-K(2-[2-(2-amino-ethoxy)-ethoxy]-acetyl)₂-(γGlu)-CO- |
| | (CH₂)₁₆-CO₂H)AQ-Aib-EFIE-αMeY-LIKGGG |
| 238 | Y-Aib-EGT-αMeF(2F)-TSD-4Pal-Aib-I-αMeL-LD-Orn-K(2-[2-(2-amino-ethoxy)-ethoxy]-acetyl)₂-(γGlu)-CO- |
| | (CH₂)₁₆-CO₂H)AQ-Aib-EFIE-αMeY-LIKGGPSSG |
| 239 | Y-Aib-EGT-αMeF(2F)-TSD-4Pal-Aib-I-αMeL-LD-Or-K(2-[2-(2-amino-ethoxy)-ethoxy]-acetyl)₂-(γGlu)-CO- |
| | (CH₂)₁₆-CO₂H)AQ-Aib-EFIE-αMeY-LIEGGPSSG |
| 240 | Y-Aib-EGT-αMeF(2F)-TSD-4Pal-Aib-I-αMeL-LD-Or-K(2-[2-(2-amino-ethoxy)-ethoxy]-acetyl)₂-(γGlu)-CO- |
| | (CH₂)₁₆-CO₂H)AQ-Aib-EFIE-αMeY-LIEGSPSSGAPPPS |
| 241 | Y-Aib-EGT-αMeF(2F)-TSD-4Pal-Aib-I-αMeL-LD-Orn-K(ϵKϵK-(γGlu)-CO-(CH₂)₁₆-CO₂H)AQ-Aib-EFIE-αMeY- |
| | LIEGSPSSGAPPPS |
| 242 | Y-Aib-EGT-αMeF(2F)-TSD-4Pal-Aib-I-αMeL-LDEK(ϵKϵK-(γGlu)-CO-(CH₂)₁₆-CO₂H)AQ-Aib-EFIE-αMeY- |
| | LIEGSPSSGAPPPS |
| 243 | Y-Aib-EGT-αMeF(2F)-TSD-4Pal-Aib-I-αMeL-LD-Or-K(2-[2-(2-amino-ethoxy)-ethoxy]-acetyl)-(γGlu)-CO- |
| | (CH₂)₁₆-CO₂H)AQ-Aib-EFIE-αMeY-LIEGGPSSGAPPPS |
| 244 | Y-Aib-EGT-αMeF(2F)-TSD-4Pal-Aib-I-αMeL-LD-Or-K(ϵKϵK-(γGlu)-CO-(CH₂)₁₆-CO₂H)AQ-Aib-EFIE-αMeY- |
| | LIEGGPSSGAPPPS |
| 245 | Y-Aib-EGT-αMeF(2F)-TSD-4Pal-Aib-I-αMeL-LDEK(ϵKϵK-(γGlu)-CO-(CH₂)₁₆-CO₂H)AQ-Aib-EFIE-αMeY- |
| | LIEGGPSSGAPPPS |
| 246 | Y-Aib-EGT-αMeF(2F)-TSD-4Pal-Aib-I-αMeL-LD-Om-K(ϵKϵK-(γGlu)-CO-(CH₂)₁₆-CO₂H)AQ-Aib-EFIe-αMeY- |
| | LIEGSPSSGAPPPS |
| 247 | Y-Aib-EGT-αMeF(2F)-TSD-4Pal-Aib-I-αMeL-LD-Or-K(ϵKϵK-(γGlu)-CO-(CH₂)₁₆-CO₂H)AQ-Aib-EFIe-αMeY- |
| | LIEGGG |
| 248 | Y-Aib-EGT-αMeF(2F)-TSD-4Pal-Aib-I-αMeL-LD-Or-K(ϵKϵK-(γGlu)-CO-(CH₂)₁₆-CO₂H)AQ-Aib-EFIE-αMeY- |
| | LIEGG-Om-SSGAPPPS |
| 249 | Y-Aib-EGT-αMeF(2F)-TSD-4Pal-Aib-I-αMeL-LD-Or-K(2-[2-(2-amino-ethoxy)-ethoxy]-acetyl)₂-(γGlu)-CO- |
| | (CH₂)₁₆-CO₂H)AQ-Aib-EFIE-αMeY-LIEGG-Om-SSGAPPPS |
| 250 | Y-Aib-EGT-αMeF(2F)-TSD-4Pal-Aib-I-αMeL-LD-Om-K(ϵKϵK-(γGlu)-CO-(CH₂)₁₆-CO₂H)AQ-Aib-EFIE-αMeY- |
| | LIEGG-Om |
| 251 | Y-Aib-EGT-αMeF(2F)-TSD-4Pal-Aib-I-αMeL-LD-Orn-K(2-[2-(2-amino-ethoxy)-ethoxy]-acetyl)₂-(γGlu)-CO- |
| | (CH₂)₁₆-CO₂H)AQ-Aib-EFIE-αMeY-LIEGG-Orn |
| 252 | Y-Aib-EGT-αMeF(2F)-TSD-4Pal-Aib-I-αMeL-LD-Or-K(ϵKϵK-(γGlu)-CO-(CH₂)₁₆-CO₂H)AQ-Aib-Orn-FIE- |
| | αMeY-LIEGSPSSGAPPPS |
| 253 | Y-Aib-EGT-αMeF(2F)-TSD-4Pal-Aib-I-αMeL-LD-Orn-K(2-[2-(2-amino-ethoxy)-ethoxy]-acetyl)₂-(γGlu)-CO- |
| | (CH₂)₁₆-CO₂H)AQ-Aib-Orn-FIE-αMeY-LIEGSPSSGAPPPS |
| 254 | Y-Aib-EGT-αMeF(2F)-TSD-4Pal-Aib-I-αMeL-LD-Or-K(2-[2-(2-amino-ethoxy)-ethoxy]-acetyl)₂-(γGlu)-CO- |
| | (CH₂)₁₆-CO₂H)AQ-Aib-EFIQ-αMeY-LIEGSPSSGAPPPS |
| 255 | Y-Aib-EGT-αMeF(2F)-TSD-4Pal-Aib-I-αMeL-LD-Orn-K(ϵKϵK-(γGlu)-CO-(CH₂)₁₆-CO₂H)AQ-Aib-EFIQ-αMeY- |
| | LIEGSPSSGAPPPS |
| 256 | Y-Aib-EGT-αMeF(2F)-TSD-4Pal-SI-αMeL-LD-Om-K(2-[2-(2-amino-ethoxy)-ethoxy]-acetyl)₂-(γGlu)-CO- |
| | (CH₂)₁₆-CO₂H)AQ-Aib-EFIE-αMeY-LIEGSPSSGAPPPS |
| 257 | Y-Aib-EGT-αMeF(2F)-TSD-4Pal-SI-αMeL-LD-Om-K(ϵKϵK-(γGlu)-CO-(CH₂)₁₆-CO₂H)AQ-Aib-EFIE-αMeY- |
| | LIEGSPSSGAPPPS |
| 258 | Y-Aib-EGT-αMeF(2F)-TSD-4Pal-SI-αMeL-LD-Om-K(ϵKϵK-(γGlu)-CO-(CH₂)₁₆-CO₂H)AQ-Aib-EFIe-αMeY- |
| | LIEGSPSSGAPPPS |
| 259 | Y-Aib-EGT-αMeF(2F)-TSD-4Pal-Aib-I-αMeL-LD-Or-K(2-[2-(2-amino-ethoxy)-ethoxy]-acetyl)₂-(γGlu)-CO- |
| | (CH₂)₁₆-CO₂H)AQ-Aib-EFIE-αMeY-LIE-Aib-SPSSGAPPPS |
| 260 | Y-Aib-EGT-αMeF(2F)-TSD-4Pal-Aib-I-αMeL-LD-Orn-K(ϵKϵK-(γGlu)-CO-(CH₂)₁₆-CO₂H)AQ-Aib-EFIE-αMeY- |
| | LIE-Aib-SPSSGAPPPS |
| 261 | Y-Aib-EGT-αMeF(2F)-TSD-4Pal-Aib-I-αMeL-LD-Om-K(ϵKϵK-(γGlu)-CO-(CH₂)₁₆-CO₂H)AQ-Aib-EFIe-αMeY- |
| | LIE-Aib-SPSSGAPPPS |
| 262 | Y-Aib-EGT-αMeF(2F)-TSD-4Pal-SI-αMeL-LD-Or-K(2-[2-(2-amino-ethoxy)-ethoxy]-acetyl)₂-(γGlu)-CO- |
| | (CH₂)₁₆-CO₂H)AQ-Aib-EFIQ-αMeY-LIEGSPSSGAPPPS |
| 263 | Y-Aib-EGT-αMeF(2F)-TSD-4Pal-SI-αMeL-LD-Om-K(ϵKϵK-(γGlu)-CO-(CH₂)₁₆-CO₂H)AQ-Aib-EFIQ-αMeY- |
| | LIEGSPSSGAPPPS |
| 264 | Y-Aib-EGT-αMeF(2F)-TSDY-Aib-I-αMeL-LD-Om-K(2-[2-(2-amino-ethoxy)-ethoxy]-acetyl)₂-(γGlu)-CO- |
| | (CH₂)₁₆-CO₂H)AQ-Aib-EFIE-αMeY-LIEGSPSSGAPPPS |
| 265 | Y-Aib-EGT-αMeF(2F)-TSDY-Aib-I-αMeL-LD-Om-K(2-[2-(2-amino-ethoxy)-ethoxy]-acetyl)₂-(γGlu)-CO- |
| | (CH₂)₁₆-CO₂H)AQ-Aib-EFIQ-αMeY-LIEGSPSSGAPPPS |
| 266 | Y-Aib-EGT-αMeF(2F)-TSDY-Aib-I-αMeL-LD-Or-K(ϵKϵK-(γGlu)-CO-(CH₂)₁₆-CO₂H)AQ-Aib-EFIe-αMeY- |
| | LIEGSPSSGAPPPS |
| 267 | Y-Aib-EGT-αMeF(2F)-TSDY-Aib-I-αMeL-LD-Or-K(ϵKϵK-(γGlu)-CO-(CH₂)₁₆-CO₂H)AQ-Aib-EFIE-αMeY- |
| | LIEGSPSSGAPPPS |
| 268 | Y-Aib-EGT-αMeF(2F)-TSDY-Aib-I-αMeL-LD-Or-K(ϵKϵK-(γGlu)-CO-(CH₂)₁₆-CO₂H)AQ-Aib-EFIQ-αMeY- |
| | LIEGSPSSGAPPPS |
| 269 | Y-Aib-EGT-αMeF(2F)-TSD-4Pal-Aib-I-αMeL-LD-Orn-K(ϵKϵK-(γGlu)-CO-(CH₂)₁₆-CO₂H)AQ-αMeL-EFIE- |
| | αMeY-LIEGSPSSGAPPPS |
| 270 | Y-Aib-EGT-αMeF(2F)-TSD-4Pal-Aib-I-αMeL-LD-Om-K(ϵKϵK-(γGlu)-CO-(CH₂)₁₆-CO₂H)AQ-Iva-EFIE-αMeY- |
| | LIEGSPSSGAPPPS |
| 271 | Y-Aib-EGT-αMeF(2F)-TSD-4Pal-Aib-I-αMeL-LD-Or-K(2-[2-(2-amino-ethoxy)-ethoxy]-acetyl)₂-(γGlu)-CO- |
| | (CH₂)₁₆-CO₂H)AQ-αMeL-EFIQ-αMeY-LIEGSPSSGAPPPS |
| 272 | Y-Aib-EGT-αMeF(2F)-TSD-4Pal-Aib-I-αMeL-LD-Orn-K(2-[2-(2-amino-ethoxy)-ethoxy]-acetyl)₂-(γGlu)-CO- |
| | (CH₂)₁₆-CO₂H)AQ-Iva-EFIQ-αMeY-LIEGSPSSGAPPPS |
| 273 | Y-Aib-EGT-αMeF(2F)-TSD-4Pal-Aib-I-αMeL-LD-Om-K(ϵKϵK-(γGlu)-CO-(CH₂)₁₆-CO₂H)AQ-αMeL-EFIQ- |
| | αMeY-LIEGSPSSGAPPPS |
| 274 | Y-Aib-EGT-αMeF(2F)-TSD-4Pal-Aib-I-αMeL-LD-Orn-K(ϵKϵK-(γGlu)-CO-(CH₂)₁₆-CO₂H)AQ-Iva-EFIQ-αMeY- |
| | LIEGSPSSGAPPPS |
| 275 | Y-Aib-EGT-αMeF(2F)-TSD-4Pal-Aib-I-αMeL-LD-Or-K(2-[2-(2-amino-ethoxy)-ethoxy]-acetyl)₂-(γGlu)-CO- |
| | (CH₂)₁₆-CO₂H)AQ-Aib-QFIE-αMeY-LIEGSPSSGAPPPS |
| 276 | Y-Aib-EGT-αMeF(2F)-TSD-4Pal-Aib-I-αMeL-LD-Or-K(ϵKϵK-(γGlu)-CO-(CH₂)₁₆-CO₂H)AQ-Aib-EFIQ-αMeY- |
| | LLEGSPSSGAPPPS |
| 277 | Y-Aib-EGT-αMeF(2F)-TSD-4Pal-SI-αMeL-LD-Or-K(2-[2-(2-amino-ethoxy)-ethoxy]-acetyl)₂-(γGlu)-CO- |
| | (CH₂)₁₆-CO₂H)AQ-Aib-EFIQ-αMeY-LIEGGG |
| 278 | Y-Aib-EGT-αMeF(2F)-TSD-4Pal-SI-αMeL-LD-Or-K(ϵKϵK-(γGlu)-CO-(CH₂)₁₆-CO₂H)AQ-Aib-EFIE-αMeY- |
| | LIEGGG |
| 279 | Y-Aib-EGT-αMeF(2F)-TSD-4Pal-SI-αMeL-LD-Or-K(ϵKϵK-(γGlu)-CO-(CH₂)₁₆-CO₂H)AQ-Aib-EFIQ-αMeY- |
| | LIEGGG |
| 280 | Y-Aib-EGT-αMeF(2F)-TSD-4Pal-Aib-I-αMeL-LD-Orn-K(2-[2-(2-amino-ethoxy)-ethoxy]-acetyl)₂-(γGlu)-CO- |
| | (CH₂)₁₆-CO₂H)AQ-Aib-EFIQ-αMeY-LIEGGG |
| 281 | Y-Aib-EGT-αMeF(2F)-TSD-4Pal-Aib-I-αMeL-LD-Orn-K(2-[2-(2-amino-ethoxy)-ethoxy]-acetyl)₂-(γGlu)-CO- |
| | (CH₂)₁₆-CO₂H)AQ-Aib-DFIQ-αMeY-LIEGSPSSGAPPPS |
| 282 | Y-Aib-EGT-αMeF(2F)-TSD-4Pal-SI-αMeL-LD-Om-K(2-[2-(2-amino-ethoxy)-ethoxy]-acetyl)₂-(γGlu)-CO- |
| | (CH₂)₁₆-CO₂H)AQ-Aib-EFIK-αMeY-LIEGSPSSGAPPPS |
| 283 | Y-Aib-EGT-αMeF(2F)-TSD-4Pal-Aib-I-αMeL-LD-Or-K(2-[2-(2-amino-ethoxy)-ethoxy]-acetyl)₂-(γGlu)-CO- |
| | (CH₂)₁₆-CO₂H)AQ-Aib-EFIK-αMeY-LIEGSPSSGAPPPS |
| 284 | Y-Aib-EGT-αMeF(2F)-TSD-4Pal-Aib-I-αMeL-LD-Or-K(eK-2-[2-(2-amino-ethoxy)-ethoxy]-acetyl)-γGlu- CO- |
| | (CH₂)₁₆-CO₂H)AQ-Aib-EFIQ-αMeY-LIEGSPSSGAPPPS |
| 285 | Y-Aib-EGT-αMeF(2F)-TSD-4Pal-Aib-I-αMeL-LD-Orn-K(2-[2-(2-amino-ethoxy)-ethoxy]-acetyl)- ek-γGlu- CO- |
| | (CH₂)₁₆-CO₂H)AQ-Aib-EFIQ-αMeY-LIEGSPSSGAPPPS |
| 286 | Y-Aib-EGT-αMeF(2F)-TSDYSI-αMeL-LD-Om-K(2-[2-(2-amino-ethoxy)-ethoxy]-acetyl)₂-(γGlu)-CO-(CH₂)₁₆- |
| | CO₂H)AQ-Aib-EFIE-αMeY-LIEGSPSSGAPPPS |
| 287 | Y-Aib-EGT-αMeF(2F)-TSDYSI-αMeL-LD-Orn-K(2-[2-(2-amino-ethoxy)-ethoxy]-acetyl)₂-(γGlu)-CO-(CH₂)₁₆- |
| | CO₂H)AQ-Aib-EFIQ-αMeY-LIEGSPSSGAPPPS |
| 288 | Y-Aib-EGT-αMeF(2F)-TSDYSI-αMeL-LD-Om-K(ϵKϵK-(γGlu)-CO-(CH₂)₁₆-CO₂H)AQ-Aib-EFIE-αMeY- |
| | LIEGSPSSGAPPPS |
| 289 | Y-Aib-EGT-αMeF(2F)-TSDYSI-αMeL-LD-Or-K(ϵKϵK-(γGlu)-CO-(CH₂)₁₆-CO₂H)AQ-Aib-EFIQ-αMeY- |
| | LIEGSPSSGAPPPS |
| 290 | Y-Aib-EGT-αMeF(2F)-TSD-4Pal-Aib-I-αMeL-LD-Om-K ϵKϵK-(γGlu)-CO-(CH₂)₁₆-CO₂H)AQ-Aib-EFIQ-αMeY- |
| | LIEGGG |
| 291 | Y-Aib-EGT-αMeF(2F)-TSD-4Pal-SI-αMeL-LD-Om-KϵKϵK-(γGlu)-CO-(CH₂)₁₆-CO₂H)AQ-Aib-EFIQ-αMeY- |
| | LIEGGG |
| 292 | Y-Aib-EGT-αMeF(2F)-TSDY-Aib-I-αMeL-LD-Om-K(2-[2-(2-amino-ethoxy)-ethoxy]-acetyl)₂-(γGlu)-CO- |
| | (CH₂)₁₆-CO₂H)AQ-Aib-EFIE-αMeY-LIEGGG |
| 293 | H-Aib-EGT-αMeF(2F)-TSD-4Pal-SI-αMeL-LD-Or-K(2-[2-(2-amino-ethoxy)-ethoxy]-acetyl)₂-(γGlu)-CO- |
| | (CH₂)₁₆-CO₂H)AQ-Aib-EFIE-αMeY-LIEGGG |
| 294 | H-Aib-EGT-αMeF(2F)-TSD-4Pal-SI-αMeL-LD-Or-K(ϵKϵK-(γGlu)-CO-(CH₂)₁₆-CO₂H)AQ-Aib-EFIE-αMeY- |
| | LIEGSPSSGAPPPS |
| 295 | Y-Aib-EGT-αMeF(2F)-TSD-4Pal-Aib-I-αMeL-LD-Or-K(2-[2-(2-amino-ethoxy)-ethoxy]-acetyl)₂-(γGlu)-CO- |
| | (CH₂)₁₆-CO₂H)AQ-Aib-EFIE-αMeY-LIEQGG |
| 296 | Y-Aib-EGT-αMeF(2F)-TSD-4Pal-SI-αMeL-LD-Or-K(ϵKϵK-(γGlu)-CO-(CH₂)₁₆-CO₂H)AQ-Aib-EFIe-αMeY- |
| | LIEGGPSSGAPPPS |
| 297 | Y-Aib-EGT-αMeF(2F)-TSD-4Pal-Aib-I-αMeL-LD-Om-K(ϵKϵK-(γGlu)-CO-(CH₂)₁₆-CO₂H)AQ-Aib-EFIe-αMeY- |
| | LIEGGPSSGAPPPS |
| 298 | Y-Aib-EGT-αMeF(2F)-TSDY-Aib-I-αMeL-LD-Orn-K(2-[2-(2-amino-ethoxy)-ethoxy]-acetyl)₂-(γGlu)-CO- |
| | (CH₂)₁₆-CO₂H)AQ-Aib-EFIe-αMeY-LIEGGPSSGAPPPS |
| 299 | Y-Aib-EGT-αMeF(2F)-TSDY-Aib-I-αMeL-LD-Om-K(ϵKϵK-(γGlu)-CO-(CH₂)₁₆-CO₂H)AQ-Aib-EFIe-αMeY- |
| | LIEGGPSSGAPPPS |
| 300 | Y-Aib-EGT-αMeF(2F)-TSD-4Pal-SI-αMeL-LD-Or-K(2-[2-(2-amino-ethoxy)-ethoxy]-acetyl)₂-(γGlu)-CO- |
| | (CH₂)₁₆-CO₂H)AQ-Aib-EFIe-αMeY-LIAGSPSSGAPPPS |
| 301 | Y-Aib-EGT-αMeF(2F)-TSD-4Pal-SI-αMeL-LD-Om-KAQ-Aib-EFIe-αMeY-LIAGSPSSGAPPPS |
| 302 | Y-Aib-EGT-αMeF(2F)-TSD-4Pal-Aib-I-αMeL-LD-Om-K(ϵKϵK-(γGlu)-CO-(CH₂)₁₆-CO₂H)AQ-Aib-EFIe-αMeY- |
| | LIAGSPSSGAPPPS |
| 303 | Y-Aib-EGT-αMeF(2F)-TSDY-Aib-I-αMeL-LD-Om-K(2-[2-(2-amino-ethoxy)-ethoxy]-acetyl)₂-(γGlu)-CO- |
| | (CH₂)₁₆-CO₂H)AQ-Aib-EFIe-αMeY-LIAGSPSSGAPPPS |
| 304 | Y-Aib-EGT-αMeF(2F)-TSDY-Aib-I-αMeL-LD-Orn-K(ϵKϵK-(γGlu)-CO-(CH₂)₁₆-CO₂H)AQ-Aib-EFIe-αMeY- |
| | LIAGSPSSGAPPPS |
| 305 | Y-Aib-EGT-αMeF(2F)-TSD-4Pal-SI-αMeL-LD-Or-K(ϵKϵK-(γGlu)-CO-(CH₂)₁₆-CO₂H)AQ-Aib-EFIe-αMeY- |
| | LIAGGPSSGAPPPS |
| 306 | Y-Aib-EGT-αMeF(2F)-TSD-4Pal-SI-αMeL-LD-Orn-K(2-[2-(2-amino-ethoxy)-ethoxy]-acetyl)₂-(γGlu)-CO- |
| | (CH₂)₁₆-CO₂H)AQ-Aib-EFIe-αMeY-LIAGGPSSGAPPPS |
| 307 | Y-Aib-EGT-αMeF(2F)-TSDY-Aib-I-αMeL-LD-Om-K(ϵKϵK-(γGlu)-CO-(CH₂)₁₆-CO₂H)AQ-Aib-EFIe-αMeY- |
| | LIAGGPSSGAPPPS |
| 308 | Y-Aib-EGT-αMeF(2F)-TSDY-Aib-I-αMeL-LD-Om-K(2-[2-(2-amino-ethoxy)-ethoxy]-acetyl)₂-(γGlu)-CO- |
| | (CH₂)₁₆-CO₂H)AQ-Aib-EFIe-αMeY-LIAGGPSSGAPPPS |
| 309 | Y-Aib-EGT-αMeF(2F)-TSD-4Pal-SI-αMeL-LD-Om-K(2-[2-(2-amino-ethoxy)-ethoxy]-acetyl)-(γGlu)-CO-(CH₂)₁₆- |
| | CO₂H)AQ-Aib-EFIe-αMeY-LIEGSPSSGAPPPS |
| 310 | Y-Aib-EGT-αMeF(2F)-TSDY-Aib-I-αMeL-LD-Or-K(2-[2-(2-amino-ethoxy)-ethoxy]-acetyl)-(γGlu)-CO-(CH₂)₁₆- |
| | CO₂H)AQ-Aib-EFIe-αMeY-LIEGSPSSGAPPPS |
| 311 | Y-Aib-EGT-αMeF(2F)-TSD-4Pal-SI-αMeL-LD-Or-K(ϵKϵK-(γGlu)-CO-(CH₂)₁₆-CO₂H)AQ-Aib-EFIe-αMeY- |
| | LVEGSPSSGAPPPS |
| 312 | Y-Aib-EGT-αMeF(2F)-TSD-4Pal-SI-αMeL-LD-Om-K(2-[2-(2-amino-ethoxy)-ethoxy]-acetyl)₂-(γGlu)-CO- |
| | (CH₂)₁₆-CO₂H)AQ-Aib-EFIE-αMeY-LIAGSPSSGAPPPS |
| 313 | Y-Aib-EGT-αMeF(2F)-TSD-4Pal-SI-αMeL-LD-Or-K(ϵKϵK-(γGlu)-CO-(CH₂)₁₆-CO₂H)AQ-Aib-EFIE-αMeY- |
| | LIAGSPSSGAPPPS |
| 314 | Y-Aib-EGT-αMeF(2F)-TSDY-Aib-I-αMeL-LD-Orn-K(2-[2-(2-amino-ethoxy)-ethoxy]-acetyl)₂-(γGlu)-CO- |
| | (CH₂)₁₆-CO₂H)AQ-Aib-EFIE-αMeY-LIAGSPSSGAPPPS |
| 315 | Y-Aib-EGT-αMeF(2F)-TSDY-Aib-I-αMeL-LD-Om-K(ϵKϵK-(γGlu)-CO-(CH₂)₁₆-CO₂H)AQ-Aib-EFIE-αMeY- |
| | LIAGSPSSGAPPPS |
| 316 | Y-Aib-EGT-αMeF(2F)-TSD-4Pal-SI-αMeL-LDEK(Ac)AQ-Aib-EFIe-αMeY-LIEGSPSSGAPPPS |
| 317 | Y-Aib-EGT-αMeF(2F)-TSD-4Pal-SI-αMeL-LDEQAQ-Aib-EFIe-αMeY-LIEGSPSSGAPPPS |
| 318 | Y-Aib-EGT-αMeF(2F)-TSD-4Pal-SI-αMeL-LD-Or-K(2-[2-(2-amino-ethoxy)-ethoxy]-acetyl)₂-(γGlu)-CO- |
| | (CH₂)₁₈-CO₂H)AQ-Aib-EFIe-αMeY-LIEGSPSSGAPPPS |
| 319 | Y-Aib-EGT-αMeF(2F)-TSD-4Pal-SI-αMeL-LD-Or-K(2-[2-(2-amino-ethoxy)-ethoxy]-acetyl)₂-(γGlu)-CO- |
| | (CH₂)₁₄-CO₂H)AQ-Aib-EFIe-αMeY-LIEGSPSSGAPPPS |
| 320 | Y-Aib-EGT-αMeF(2F)-TSD-4Pal-SI-αMeL-LDEK(2-[2-(2-amino-ethoxy)-ethoxy]-acetyl)₂-(γGlu)-CO-(CH₂)₁₄- |
| | CO₂H)AQ-Aib-EFIe-αMeY-LIEGSPSSGAPPPS |
| 321 | Y-Aib-EGT-αMeF(2F)-TSD-4Pal-SI-αMeL-LD-Or-K(ϵKϵK-(γGlu)-CO-(CH₂)₁₈-CO₂H)AQ-Aib-EFIe-αMeY- |
| | LIEGSPSSGAPPPS |
| 322 | Y-Aib-EGT-αMeF(2F)-TSD-4Pal-SI-αMeL-LDEK(ϵKϵK-(γGlu)-CO-(CH₂)₁₈-CO₂H)AQ-Aib-EFIe-αMeY- |
| | LIEGSPSSGAPPPS |
| 323 | Y-Aib-EGT-αMeF(2F)-TSD-4Pal-SI-αMeL-LD-Om-K(2-[2-(2-amino-ethoxy)-ethoxy]-acetyl)₂-(γGlu)-CO- |
| | (CH₂)₁₄-CO₂H)AQ-Aib-EFIE-αMeY-LIEGGG |
| 324 | Y-Aib-EGT-αMeF(2F)-TSD-4Pal-SI-αMeL-LDEK(γGlu-(2-[2-(2-amino-ethoxy)-ethoxy]-acetyl)-ϵK-CO-(CH₂)₁₈- |
| | CO₂H)AQ-Aib-EFIe-αMeY-LIEGSPSSGAPPPS |
| 325 | Y-Aib-EGT-αMeF(2F)-TSD-4Pal-Aib-I-αMeL-LD-Or-K(2-[2-(2-amino-ethoxy)-ethoxy]-acetyl)₂-(γGlu)-CO- |
| | (CH₂)₁₄-CO₂H)AQ-Aib-EFIE-αMeY-LIEGGG |
| 326 | Y-Aib-EGT-αMeF(2F)-TSD-4Pal-Aib-I-αMeL-LD-Or-K(2-[2-(2-amino-ethoxy)-ethoxy]-acetyl)-(γGlu)-CO- |
| | (CH₂)₁₄-CO₂H)AQ-Aib-EFIE-αMeY-LIEGGPSSG |
| 327 | Y-Aib-EGT-αMeF(2F)-TSD-4Pal-Aib-I-αMeL-LDEK(ϵKϵK-(γGlu)-CO-(CH₂)₁₄-CO₂H)AQ-Aib-EFIE-αMeY- |
| | LIEGGPSSG |
| 328 | Y-Aib-EGT-aMcF(2F)-TSD-4Pal-Aib-I-αMeL-LDEK(ϵKϵK-(γGlu)-CO-(CH₂)₁₄-CO₂H)AQ-Aib-EFIE-αMeY- |
| | LIEGGG |
| 329 | Y-Aib-EGT-αMeF(2F)-TSD-4Pal-SI-αMeL-LDEK(2-[2-(2-amino-ethoxy)-ethoxy]-acetyl)₂-(γGlu)-CO-(CH₂)₁₄- |
| | CO₂H)AQ-Aib-EFIE-αMeY-LIEGGG |
| 330 | Y-Aib-EGT-αMeF(2F)-TSDY-Aib-I-αMeL-LD-Orn-K(2-[2-(2-amino-ethoxy)-ethoxy]-acetyl)₂-(γGlu)-CO- |
| | (CH₂)₁₆-CO₂H)AQ-Aib-EFIe-αMeY-LIEGSPSSGAPPPS |
| 331 | Y-Aib-EGT-αMeF(2F)-TSD-4Pal-Aib-I-αMeL-LD-Or-K(2-[2-(2-amino-ethoxy)-ethoxy]-acetyl)₂-(γGlu)-CO- |
| | (CH₂)₁₆-CO₂H)AQ-Aib-EFIQ-αMeY-LIE-Aib-SPSSGAPPPS |
| 332 | Y-Aib-EGT-αMeF(2F)-TSD-4Pal-Aib-I-αMeL-LD-Orn-K(ϵKϵK-(γGlu)-CO-(CH₂)₁₆-CO₂H)AQ-Aib-EFIQ-αMeY- |
| | LIE-Aib-SPSSGAPPPS |
| 333 | Y-Aib-QGT-αMeF(2F)-TSD-4Pal-SI-αMeL-LD-Or-K(2-[2-(2-amino-ethoxy)-ethoxy]-acetyl)₂-(γGlu)-CO- |
| | (CH₂)₁₆-CO₂H)AQ-αMe4Pal-Orn-FIe-αMeY-LIEGSPSSGAPPPS |
| 334 | Y-Aib-QGT-αMeF(2F)-TSD-4Pal-SI-αMeL-LD-Om-K(2-[2-(2-amino-ethoxy)-ethoxy]-acetyl)₂-(γGlu)-CO- |
| | (CH₂)₁₆-CO₂H)AQ-αMe4Pal-Om-FIE-αMeY-LIEGSPSSGAPPPS |
| 335 | Y-Aib-QGT-αMeF(2F)-TSD-4Pal-αMeS-I-αMeL-LD-Om-K(2-[2-(2-amino-ethoxy)-ethoxy]-acetyl)₂-(γGlu)-CO- |
| | (CH₂)₁₆-CO₂H)AQ-αMe4Pal-Orn-FIe-αMeY-LIEGSPSSGAPPPS |
| 336 | Y-Aib-QGT-αMeF(2F)-TSD-4Pal-αMeS-I-αMeL-LD-Om-K(2-[2-(2-amino-ethoxy)-ethoxy]-acetyl)₂-(γGlu)-CO- |
| | (CH₂)₁₆-CO₂H)AQ-αMe4Pal-Om-FIE-αMeY-LIEGSPSSGAPPPS |
| 337 | Y-Aib-QGT-αMeF(2F)-TSDY-αMeS-I-αMeL-LD-Or-K(2-[2-(2-amino-ethoxy)-ethoxy]-acetyl)₂-(γGlu)-CO- |
| | (CH₂)₁₆-CO₂H)AQ-αMe4Pal-Om-FIe-αMeY-LIEGSPSSGAPPPS |
| 338 | Y-Aib-QGT-αMeF(2F)-TSDY-αMeS-I-αMeL-LD-Or-K(2-[2-(2-amino-ethoxy)-ethoxy]-acetyl)₂-(γGlu)-CO- |
| | (CH₂)₁₆-CO₂H)AQ-αMe4Pal-Om-FIE-αMeY-LIEGSPSSGAPPPS |
| 339 | Y-Aib-QGT-αMeF(2F)-TSD-4Pal-αMeS-I-αMeL-LD-Or-K(2-[2-(2-amino-ethoxy)-ethoxy]-acetyl)₂-(γGlu)-CO- |
| | (CH₂)₁₆-CO₂H)AQ-αMe4Pal-Or-FIE-αMeY-LIEGGG |
| 340 | Y-Aib-QGT-αMeF(2F)-TSDY-αMeS-I-αMeL-LD-Orn-K(2-[2-(2-amino-ethoxy)-ethoxy]-acetyl)₂-(γGlu)-CO- |
| | (CH₂)₁₆-CO₂H)AQ-αMe4Pal-Or-FIe-αMeY-LIEGGG |
| 341 | Y-Aib-QGT-αMeF(2F)-TSD-4Pal-αMeS-I-αMeL-LD-Orn-K(2-[2-(2-amino-ethoxy)-ethoxy]-acetyl)₂-(γGlu)-CO- |
| | (CH₂)₁₆-CO₂H)AQ-αMe4Pal-Om-FIE-αMeY-LIEGGPSSGAPPPS |
| 342 | Y-Aib-QGT-αMeF(2F)-TSDY-αMeS-I-αMeL-LD-Orn-K(2-[2-(2-amino-ethoxy)-ethoxy]-acetyl)₂-(γGlu)-CO- |
| | (CH₂)₁₆-CO₂H)AQ-αMe4Pal-Orn-FIe-αMeY-LIEGGPSSGAPPPS |
| 343 | Y-Aib-QGT-αMeF(2F)-TSD-4Pal-αMeS-I-αMeL-LD-Om-KAQ-αMe4Pal-Orn-FIE-αMeY-LIEGGPSSGAPPPS |
| 344 | Y-Aib-QGT-αMeF(2F)-TSDY-αMeS-I-αMeL-LD-Orn-K(ϵKϵK-(γGlu)-CO-(CH₂)₁₆-CO₂H)AQ-αMe4Pal-Om-FIe- |
| | αMeY-LIEGGPSSGAPPPS |
| 345 | Y-Aib-QGT-αMeF(2F)-TSD-4Pal-αMeS-I-αMeL-LD-Om-K(2-[2-(2-amino-ethoxy)-ethoxy]-acetyl)₂-(γGlu)-CO- |
| | (CH₂)₁₆-CO₂H)AQ-αMe4Pal-Orn-FIK-αMeY-LIEGGPSSGAPPPSGG |
| 346 | Y-Aib-QGT-αMeF(2F)-TSDY-αMeS-I-αMeL-LD-Orn-K(2-[2-(2-amino-ethoxy)-ethoxy]-acetyl)₂-(γGlu)-CO- |
| | (CH₂)₁₆-CO₂H)AQ-αMe4Pal-Om-FIK-αMeY-LIEGGPSSGAPPPSGG |
| 347 | Y-Aib-QGT-αMeF(2F)-TSD-4Pal-αMeS-I-αMeL-LD-Or-K(ϵKϵK-(γGlu)-CO-(CH₂)₁₆-CO₂H)AQ-αMe4Pal-Om- |
| | FIK-αMeY-LIEGGPSSGAPPPSGG |
| 348 | Y-Aib-QGT-αMeF(2F)-TSDY-αMeS-I-αMeL-LD-Orn-K(ϵKϵK-(γGlu)-CO-(CH₂)₁₆-CO₂H)AQ-αMe4Pal-Or- |
| | FIKαMeY-LIEGGPSSGAPPPSGG |
| 349 | Y-Aib-QGT-αMeF(2F)-TSD-4Pal-αMeS-I-αMeL-LD-Om-K(2-[2-(2-amino-ethoxy)-ethoxy]-acetyl)₂-(γGlu)-CO- |
| | (CH₂)₁₆-CO₂H)AQ-αMe4Pal-Om-FIE-αMeY-LIEGGPSSG |
| 350 | Y-Aib-QGT-αMeF(2F)-TSDY-αMeS-I-αMeL-LD-Orn-K(2-[2-(2-amino-ethoxy)-ethoxy]-acetyl)₂-(γGlu)-CO- |
| | (CH₂)₁₆-CO₂H)AQ-αMe4Pal-Or-FIe-αMeY-LIEGGPSSG |
| 351 | Y-Aib-QGT-αMeF(2F)-TSD-4Pal-αMeS-I-αMeL-LD-Or-K(ϵKϵK-(γGlu)-CO-(CH₂)₁₆-CO₂H)AQ-αMe4Pal-Orn- |
| | FIE-αMeY-LIEGGPSSG |
| 352 | Y-Aib-QGT-αMeF(2F)-TSDY-αMeS-I-αMeL-LD-Orn-K(ϵKϵK-(γGlu)-CO-(CH₂)₁₆-CO₂H)AQ-αMe4Pal-Om-FIe- |
| | αMeY-LIEGGPSSG |
| 353 | Y-Aib-QGT-aMcF(2F)-TSD-4Pal-αMeS-I-αMeL-LD-Om-K(ϵKϵK-(γGlu)-CO-(CH₂)₁₆-CO₂H)AQ-αMe4Pal-Orn- |
| | FIE-αMeY-LIEGGG |
| 354 | Y-Aib-QGT-αMeF(2F)-TSDY-αMeS-I-αMeL-LD-Orn-K(ϵKϵK-(γGlu)-CO-(CH₂)₁₆-CO₂H)AQ-αMe4Pal-Om-FIe- |
| | αMeY-LIEGGG |
| 355 | Y-Aib-QGT-αMeF(2F)-TSD-4Pal-αMeS-I-αMeL-LD-Om-K(ϵKϵK-(γGlu)-CO-(CH₂)₁₆-CO₂H)AQ-αMe4Pal-Om- |
| | FIE-αMeY-LIEGSPSSGAPPPS |
| 356 | Y-Aib-QGT-αMeF(2F)-TSDY-αMeS-I-αMeL-LD-Orn-K(ϵKϵK-(γGlu)-CO-(CH₂)₁₆-CO₂H)AQ-αMe4Pal-Om-FIe- |
| | αMeY-LIEGSPSSGAPPPS |
| 357 | Y-Aib-QGT-αMeF(2F)-TSD-4Pal-αMeS-I-αMeL-LD-Or-K(2-[2-(2-amino-ethoxy)-ethoxy]-acetyl)₂-(γGlu)-CO- |
| | (CH₂)₁₆-CO₂H)AQ-αMe4Pal-Om-FIe-αMeY-LIEGSPSSG |
| 358 | Y-Aib-QGT-αMeF(2F)-TSD-4Pal-αMeS-I-αMeL-LD-Om-K(2-[2-(2-amino-ethoxy)-ethoxy]-acetyl)₂-(γGlu)-CO- |
| | (CH₂)₁₆-CO₂H)AQ-αMe4Pal-Orn-FIe-αMeY-LIEGGG |
| 359 | Y-Aib-QGT-αMeF(2F)-TSD-4Pal-αMeS-I-αMeL-LD-Orn-K(ϵKϵK-(γGlu)-CO-(CH₂)₁₆-CO₂H)AQ-αMe4Pal-Om- |
| | FIe-αMeY-LIEGSPSSGAPPPS |
| 360 | Y-Aib-QGT-αMeF(2F)-TSD-4Pal-αMeS-I-αMeL-LD-Or-K(2-[2-(2-amino-ethoxy)-ethoxy]-acetyl)₂-(γGlu)-CO- |
| | (CH₂)₁₆-CO₂H)AQ-αMe4Pal-Orn-FIQ-αMeY-LIEGSPSSGAPPPS |
| 361 | Y-Aib-QGT-αMeF(2F)-TSD-4Pal-αMeS-I-αMeL-LD-Om-K(ϵKϵK-(γGlu)-CO-(CH₂)₁₆-CO₂H)AQ-αMe4Pal-Om- |
| | FIQ-αMeY-LIEGSPSSGAPPPS |
| 362 | Y-Aib-QGT-αMeF(2F)-TSDY-αMeS-I-αMeL-LD-Or-K(2-[2-(2-amino-ethoxy)-ethoxy]-acetyl)₂-(γGlu)-CO- |
| | (CH₂)₁₆-CO₂H)AQ-αMe4Pal-Orn-FIQ-αMeY-LIEGSPSSGAPPPS |
| 363 | Y-Aib-QGT-αMeF(2F)-TSDY-αMeS-I-αMeL-LD-Orn-K(ϵKϵK-(γGlu)-CO-(CH₂)₁₆-CO₂H)AQ-αMe4Pal-Or-FIQ- |
| | αMeY-LIEGSPSSGAPPPS |
| 364 | Y-Aib-QGT-αMeF(2F)-TSDY-αMeS-I-αMeL-LD-Orn-K(2-[2-(2-amino-ethoxy)-ethoxy]-acetyl)₂-(γGlu)-CO- |
| | (CH₂)₁₆-CO₂H)AQ-αMe4Pal-Orn-FIe-αMeY-LIE-Aib-SPSSGAPPPS |
| 365 | Y-Aib-QGT-αMeF(2F)-TSDY-αMeS-I-αMeL-LD-Or-K(2-[2-(2-amino-ethoxy)-ethoxy]-acetyl)₂-(γGlu)-CO- |
| | (CH₂)₁₆-CO₂H)AQ-αMe4Pal-EFIe-αMeY-LIEGSPSSGAPPPS |
| 366 | Y-Aib-QGT-αMeF(2F)-TSDY-αMeS-I-αMeL-LD-Orn-K(2-[2-(2-amino-ethoxy)-ethoxy]-acetyl)₂-(γGlu)-CO- |
| | (CH₂)₁₆-CO₂H)AQ-αMe4Pal-EFIQ-αMeY-LIEGSPSSGAPPPS |
| 367 | Y-Aib-QGT-αMeF(2F)-TSDY-αMeS-I-αMeL-LD-Orn-K(2-[2-(2-amino-ethoxy)-ethoxy]-acetyl)₂-(γGlu)-CO- |
| | (CH₂) 16-CO₂H)AQ-Aib-EFIQ-αMeY-LIEGSPSSGAPPPS |
| 368 | Y-Aib-QGT-αMeF(2F)-TSDY-αMeS-I-αMeL-LD-Orn-K(2-[2-(2-amino-ethoxy)-ethoxy]-acetyl)₂-(γGlu)-CO- |
| | (CH₂)₁₆-CO₂H)AQ-αMe4Pal-EFIQ-αMeY-LLEGSPSSGAPPPS |
| 369 | Y-Aib-QGT-αMeF(2F)-TSD-4Pal-SI-αMeL-LD-Or-K(2-[2-(2-amino-ethoxy)-ethoxy]-acetyl)₂-(γGlu)-CO- |
| | (CH₂)₁₆-CO₂H)AQ-αMe4Pal-Or-FIQ-αMeY-LIEGSPSSGAPPPS |
| 370 | Y-Aib-QGT-αMeF(2F)-TSDY-αMeS-I-αMeL-LD-Orn-K(2-[2-(2-amino-ethoxy)-ethoxy]-acetyl)₂-(γGlu)-CO- |
| | (CH₂)₁₆-CO₂H)AQ-αMe4Pal-Or-FIe-αMeY-LIE-Aib-GG |
| 371 | Y-Aib-QaT-aMcF(2F)-TSDY-αMeS-I-αMeL-LD-Orn-K(2-[2-(2-amino-ethoxy)-ethoxy]-acetyl)₂-(γGlu)-CO- |
| | (CH₂)₁₆-CO₂H)AQ-αMe4Pal-EFIQ-αMeY-LIEGSPSSGAPPPS |
| 372 | Y-αMeS-QGT-αMeF(2F)-TSDY-αMeS-I-αMeL-LD-Om-K(2-[2-(2-amino-ethoxy)-ethoxy]-acetyl)₂-(γGlu)-CO- |
| | (CH₂)₁₆-CO₂H)AQ-αMe4Pal-EFIQ-αMeY-LIEGSPSSGAPPPS |
| 373 | Y-Iva-QGT-αMeF(2F)-TSDY-αMeS-I-αMeL-LD-Orn-K(2-[2-(2-amino-ethoxy)-ethoxy]-acetyl)₂-(γGlu)-CO- |
| | (CH₂)₁₆-CO₂H)AQ-αMe4Pal-EFIQ-αMeY-LIEGSPSSGAPPPS |
| 374 | Y-Aib-HGT-αMeF(2F)-TSDY-αMeS-I-αMeL-LD-Orn-K(2-[2-(2-amino-ethoxy)-ethoxy]-acetyl)₂-(γGlu)-CO- |
| | (CH₂)₁₆-CO₂H)AQ-αMe4Pal-EFIQ-αMeY-LIEGSPSSGAPPPS |
| 375 | H-Aib-HGT-αMeF(2F)-TSDY-αMeS-I-αMeL-LD-Orn-K(2-[2-(2-amino-ethoxy)-ethoxy]-acetyl)₂-(γGlu)-CO- |
| | (CH₂)₁₆-CO₂H)AQ-αMe4Pal-EFIQ-αMeY-LIEGSPSSGAPPPS |
| 376 | H-Aib-HGT-αMeF(2F)-TSDY-αMeS-I-αMeL-LD-Orn-K(2-[2-(2-amino-ethoxy)-ethoxy]-acetyl)₂-(γGlu)-CO- |
| | (CH₂)₁₆-CO₂H)AQ-Aib-EFIQ-αMeY-LIEGSPSSGAPPPS |
| 377 | H-Aib-HGT-αMeF(2F)-TSD-4Pal-αMeS-I-αMeL-LD-Orn-K(2-[2-(2-amino-ethoxy)-ethoxy]-acetyl)₂-(γGlu)-CO- |
| | (CH₂)₁₆-CO₂H)AQ-αMe4Pal-EFIQ-αMeY-LIEGSPSSGAPPPS |
| 378 | H-Aib-HGT-αMeF(2F)-TSD-4Pal-SI-αMeL-LD-Orn-K(2-[2-(2-amino-ethoxy)-ethoxy]-acetyl)₂-(γGlu)-CO- |
| | (CH₂)₁₆-CO₂H)AQ-αMe4Pal-EFIQ-αMeY-LIEGSPSSGAPPPS |
| 379 | Y-Aib-QGT-αMeF(2F)-TSDY-αMeS-I-αMeL-LD-Orn-K(2-[2-(2-amino-ethoxy)-ethoxy]-acetyl)₂-(γGlu)-CO- |
| | (CH₂)₁₆-CO₂H)AQ-αMe4Pal-EFIQ-αMeY-LIE-Aib-SPSSGAPPPS |
| 380 | Y-Aib-QGT-αMeF(2F)-TSDY-αMeS-I-αMeL-LD-Om-K(2-[2-(2-amino-ethoxy)-ethoxy]-acetyl)₂-(γGlu)-CO- |
| | (CH₂)₁₆-CO₂H)AQ-αMe4Pal-EFIE-αMeY-LIEGSPSSGAPPPS |
| 381 | Y-Aib-QGT-αMeF(2F)-TSD-4Pal-αMeS-I-αMeL-LD-Om-K(2-[2-(2-amino-ethoxy)-ethoxy]-acetyl)₂-(γGlu)-CO- |
| | (CH₂)₁₆-CO₂H)AQ-αMe4Pal-EFIQ-αMeY-LIEGSPSSGAPPPS |
| 382 | Y-Aib-QGT-αMeF(2F)-TSD-4Pal-αMeS-I-αMeL-LD-Or-K(2-[2-(2-amino-ethoxy)-ethoxy]-acetyl)₂-(γGlu)-CO- |
| | (CH₂)₁₆-CO₂H)AQ-αMe4Pal-EFIE-αMeY-LIEGSPSSGAPPPS |
| 383 | Y-Aib-QGT-αMeF(2F)-TSDY-αMeS-I-αMeL-LD-Orn-K(2-[2-(2-amino-ethoxy)-ethoxy]-acetyl)-(γGlu)-CO- |
| | (CH₂)₁₆-CO₂H)AQ-αMe4Pal-EFIQ-αMeY-LIEGSPSSGAPPPS |
| 384 | Y-Aib-QGT-αMeF(2F)-TSDY-αMeS-I-αMeL-LD-Orn-K(2-[2-(2-amino-ethoxy)-ethoxy]-acetyl)₂-(γGlu)-CO- |
| | (CH₂)₁₆-CO₂H)AQ-αMe4Pal-EFIE-αMeY-LIE-Aib-SPSSGAPPPS |
| 385 | Y-Aib-QGT-αMeF(2F)-TSD-4Pal-αMeS-I-αMeL-LD-Or-K(2-[2-(2-amino-ethoxy)-ethoxy]-acetyl)₂-(γGlu)-CO- |
| | (CH₂)₁₆-CO₂H)AQ-αMe4Pal-EFIQ-αMeY-LIE-Aib-SPSSGAPPPS |
| 386 | Y-Aib-QGT-αMeF(2F)-TSD-4Pal-αMeS-I-αMeL-LD-Or-K(2-[2-(2-amino-ethoxy)-ethoxy]-acetyl)₂-(γGlu)-CO- |
| | (CH₂)₁₆-CO₂H)AQ-αMe4Pal-EFIE-αMeY-LIE-Aib-SPSSGAPPPS |
| 387 | Y-Aib-QGT-αMeF(2F)-TSDY-αMeS-I-αMeL-LD-Orn-K(2-[2-(2-amino-ethoxy)-ethoxy]-acetyl)-(γGlu)-CO- |
| | (CH₂)₁₆-CO₂H)AQ-αMe4Pal-EFIQ-αMeY-LIE-Aib-SPSSGAPPPS |
| 388 | Y-Aib-QGT-αMeF(2F)-TSDY-αMeS-I-αMeL-LDEK(2-[2-(2-amino-ethoxy)-ethoxy]-acetyl)-(γGlu)-CO-(CH₂)₁₆- |
| | CO₂H)AQ-αMe4Pal-EFIQ-αMeY-LLEGSPSSGAPPPS |
| 389 | Y-Aib-QGT-αMeF(2F)-TSDY-αMeS-I-αMeL-LDEK(2-[2-(2-amino-ethoxy)-ethoxy]-acetyl)-(γGlu)-CO-(CH₂)₁₆- |
| | CO₂H)AQ-αMe4Pal-EFIQ-αMeY-LLE-Aib-SPSSGAPPPS |
| 390 | H-Aib-QGT-αMeF(2F)-TSDY-αMeS-I-αMeL-LD-Or-K(2-[2-(2-amino-ethoxy)-ethoxy]-acetyl)₂-(γGlu)-CO- |
| | (CH₂)₁₆-CO₂H)AQ-αMe4Pal-EFIQ-αMeY-LIEGSPSSGAPPPS |
| 391 | Y-Aib-QGT-αMeF(2F)-TSDY-αMeS-I-αMeL-LD-Or-K(2-[2-(2-amino-ethoxy)-ethoxy]-acetyl)₂-(γGlu)-CO- |
| | (CH₂)₁₆-CO₂H)AQ-αMe4Pal-EFIQ-αMeY-L VEGSPSSGAPPPS |
| 392 | Y-Aib-QGT-αMeF(2F)-TSDY-αMeS-I-αMeL-LD-Orn-K(2-[2-(2-amino-ethoxy)-ethoxy]-acetyl)₂-(γGlu)-CO- |
| | (CH₂)₁₆-CO₂H)AQ-αMe4Pal-EFIQ-αMeY-LIEGGG |
| 393 | H-Aib-HGT-αMeF(2F)-TSDY-αMeS-I-αMeL-LD-Orn-K(2-[2-(2-amino-ethoxy)-ethoxy]-acetyl)₂-(γGlu)-CO- |
| | (CH₂)₁₆-CO₂H)AQ-Aib-EFIQ-αMeY-LLEGSPSSGAPPPS |
| 394 | H-Aib-HGT-αMeF(2F)-TSD-4Pal-SI-αMeL-LD-Orn-K(2-[2-(2-amino-ethoxy)-ethoxy]-acetyl)₂-(γGlu)-CO- |
| | (CH₂)₁₆-CO₂H)AQ-αMe4Pal-EFIQ-αMeY-LLEGSPSSGAPPPS |
| 395 | Y-Aib-QGT-αMeF(2F)-TSDY-αMeS-I-αMeL-LD-Orn-K(2-[2-(2-amino-ethoxy)-ethoxy]-acetyl)-(γGlu)-CO- |
| | (CH₂)₁₆-CO₂H)AQ-αMe4Pal-EFIE-αMeY-LIEGSPSSGAPPPS |
| 396 | Y-Aib-QGT-αMeF(2F)-TSD-4Pal-αMeS-I-αMeL-LD-Om-K(2-[2-(2-amino-ethoxy)-ethoxy]-acetyl)-(γGlu)-CO- |
| | (CH₂)₁₆-CO₂H)AQ-αMe4Pal-EFIQ-αMeY-LIEGSPSSGAPPPS |
| 397 | Y-Aib-QGT-αMeF(2F)-TSDY-αMeS-I-αMeL-LD-Orn-K(2-[2-(2-amino-ethoxy)-ethoxy]-acetyl)₂-(γGlu)-CO- |
| | (CH₂)₁₆-CO₂H)AQ-αMe4Pal-DFIQ-αMeY-LIEGSPSSGAPPPS |
| 398 | Y-Aib-QGT-αMeF(2F)-TSDY-αMeS-I-αMeL-LD-Or-K(2-[2-(2-amino-ethoxy)-ethoxy]-acetyl)₂-(γGlu)-CO- |
| | (CH₂)₁₆-CO₂H)AQ-αMe4Pal-Orn-FIE-αMeY-LIA-Aib-SPSSGAPPPS |
| 399 | Y-Aib-QGT-αMeF(2F)-TSDY-αMeS-I-αMeL-LD-Orn-K(2-[2-(2-amino-ethoxy)-ethoxy]-acetyl)₂-(γGlu)-CO- |
| | (CH₂)₁₆-CO₂H)AQ-αMe4Pal-EFIQ-αMeY-LLE-Aib-SPSSGAPPPS |
| 400 | H-Aib-QGT-αMeF(2F)-TSDY-αMeS-I-αMeL-LD-Orn-K(2-[2-(2-amino-ethoxy)-ethoxy]-acetyl)₂-(γGlu)-CO- |
| | (CH₂)₁₆-CO₂H)AQ-αMe4Pal-EFIE-αMeY-LIEGSPSSGAPPPS |
| 401 | H-Aib-QGT-αMeF(2F)-TSDY-αMeS-I-αMeL-LD-Orn-K(2-[2-(2-amino-ethoxy)-ethoxy]-acetyl)₂-(γGlu)-CO- |
| | (CH₂)₁₆-CO₂H)AQ-αMe4Pal-EFIE-αMeY-LIE-Aib-SPSSGAPPPS |
| 402 | H-Aib-QGT-αMeF(2F)-TSDY-αMeS-I-αMeL-LD-Orn-K(2-[2-(2-amino-ethoxy)-ethoxy]-acetyl)₂-(γGlu)-CO- |
| | (CH₂)₁₆-CO₂H)AQ-αMe4Pal-EFIE-αMeY-LLEGSPSSGAPPPS |
| 403 | H-Aib-QGT-αMeF(2F)-TSDY-αMeS-I-αMeL-LD-Orn-K(2-[2-(2-amino-ethoxy)-ethoxy]-acetyl)₂-(γGlu)-CO- |
| | (CH₂)₁₆-CO₂H)AQ-αMe4Pal-EFIE-αMeY-LLE-Aib-SPSSGAPPPS |
| 404 | H-Aib-QGT-αMeF(2F)-TSDY-αMeS-I-αMeL-LD-Orn-K(2-[2-(2-amino-ethoxy)-ethoxy]-acetyl)-(γGlu)-CO- |
| | (CH₂)₁₆-CO₂H)AQ-αMe4Pal-EFIE-αMeY-LIEGSPSSGAPPPS |
| 405 | H-Aib-QGT-αMeF(2F)-TSDY-αMeS-I-αMeL-LD-Orn-K(2-[2-(2-amino-ethoxy)-ethoxy]-acetyl)-(γGlu)-CO- |
| | (CH₂)₁₆-CO₂H)AQ-αMe4Pal-EFIE-αMeY-LIE-Aib-SPSSGAPPPS |
| 406 | H-Aib-QGT-αMeF(2F)-TSDY-αMeS-I-αMeL-LD-Orn-K(2-[2-(2-amino-ethoxy)-ethoxy]-acetyl)-(γGlu)-CO- |
| | (CH₂)₁₆-CO₂H)AQ-αMe4Pal-EFIE-αMeY-LLEGSPSSGAPPPS |
| 407 | H-Aib-QGT-αMeF(2F)-TSDY-αMeS-I-αMeL-LD-Orn-K(2-12-(2-amino-ethoxy)-ethoxy]-acetyl)₂-(γGlu)-CO- |
| | (CH₂)₁₆-CO₂H)AQ-αMe4Pal-EFIQ-αMeY-LIE-Aib-SPSSGAPPPS |
| 408 | H-Aib-QGT-αMeF(2F)-TSDY-αMeS-I-αMeL-LD-Orn-K(2-[2-(2-amino-ethoxy)-ethoxy]-acetyl)₂-(γGlu)-CO- |
| | (CH₂)₁₆-CO₂H)AQ-αMe4Pal-EFIQ-αMeY-LLE-Aib-SPSSGAPPPS |
| 409 | H-Aib-QGT-αMeF(2F)-TSDY-αMeS-I-αMeL-LD-Or-K(2-[2-(2-amino-ethoxy)-ethoxy]-acetyl)-(γGlu)-CO- |
| | (CH₂)₁₆-CO₂H)AQ-αMe4Pal-EFIQ-αMeY-LIE-Aib-SPSSGAPPPS |
| 410 | H-Aib-QGT-αMeF(2F)-TSDY-αMeS-I-αMeL-LD-Orn-K(2-[2-(2-amino-ethoxy)-ethoxy]-acetyl)-(γGlu)-CO- |
| | (CH₂)₁₆-CO₂H)AQ-αMe4Pal-EFIQ-αMeY-LLE-Aib-SPSSGAPPPS |
| 411 | Y-αMeS-QGT-αMeF(2F)-TSDY-αMeS-I-αMeL-LD-Or-K(2-[2-(2-amino-ethoxy)-ethoxy]-acetyl)-(γGlu)-CO- |
| | (CH₂)₁₆-CO₂H)AQ-αMe4Pal-EFIE-αMeY-LIEGSPSSGAPPPS |
| $12 | Y-Iva-QGT-αMeF(2F)-TSDY-αMeS-I-αMeL-LD-Orn-K(2-[2-(2-amino-ethoxy)-ethoxy]-acetyl)-(γGlu)-CO- |
| | (CH₂)₁₆-CO₂H)AQ-αMe4Pal-EFIE-αMeY-LIEGSPSSGAPPPS |
| 413 | Y-Ac4c-QGT-αMeF(2F)-TSDY-αMeS-I-αMeL-LD-Or-K(2-[2-(2-amino-ethoxy)-ethoxy]-acetyl)-(γGlu)-CO- |
| | (CH₂)₁₆-CO₂H)AQ-αMe4Pal-EFIE-αMeY-LIEGSPSSGAPPPS |
| 414 | H-Aib-QGT-αMeF(2F)-TSDY-αMeS-I-αMeL-LD-Orn-K(2-[2-(2-amino-ethoxy)-ethoxy]-acetyl)-(γGlu)-CO- |
| | (CH₂)₁₆-CO₂H)AQ-αMe4Pal-Orn-FIK-αMeY-LLEGSPSSGAPPPS |
| 415 | H-Aib-QGT-αMeF(2F)-TSDY-αMeS-I-αMeL-LD-Orn-K(2-[2-(2-amino-ethoxy)-ethoxy]-acetyl)-(γGlu)-CO- |
| | (CH₂)₁₆-CO₂H)AQ-αMe4Pal-EFIKαMeY-LLEGSPSSGAPPPS |
| 416 | H-Aib-QGT-αMeF(2F)-TSDY-αMeS-I-αMeL-LD-Orn-K(2-[2-(2-amino-ethoxy)-ethoxy]-acetyl)-(γGlu)-CO- |
| | (CH₂)₁₆-CO₂H)AQ-αMe4Pal-Orn-FIe-αMeY-LIEGSPSSGAPPPS |
| 417 | H-Aib-QGT-αMeF(2F)-TSDY-αMeS-I-αMeL-LD-Orn-K(2-[2-(2-amino-ethoxy)-ethoxy]-acetyl)-(γGlu)-CO- |
| | (CH₂)₁₆-CO₂H)AQ-αMe4Pal-Om-FIe-αMeY-LLEGSPSSGAPPPS |
| 418 | H-Aib-QGT-αMeF(2F)-TSDY-αMeS-I-αMeL-LD-Orn-K(2-[2-(2-amino-ethoxy)-ethoxy]-acetyl)-(γGlu)-CO- |
| | (CH₂)₁₆-CO₂H)AQ-αMe4Pal-Or-FIE-αMeY-LIEGSPSSGAPPPS |
| 419 | H-Aib-QGT-αMeF(2F)-TSDY-αMeS-I-αMeL-LD-Orn-K(2-[2-(2-amino-ethoxy)-ethoxy]-acetyl)-(γGlu)-CO- |
| | (CH₂)₁₆-CO₂H)AQ-αMe4Pal-Or-FIE-αMeY-LLEGSPSSGAPPPS |
| 420 | Y-Aib-QGT-αMeF(2F)-TSDY-αMeS-I-αMeL-LD-Orn-K(2-[2-(2-amino-ethoxy)-ethoxy]-acetyl)-(γGlu)-CO- |
| | (CH₂)₁₆-CO₂H)AQ-αMe4Pal-EFIE-αMeY-LLEGSPSSGAPPPS |
| 421 | Y-Aib-QGT-αMeF(2F)-TSDY-αMeS-I-αMeL-LD-Orn-K(2-[2-(2-amino-ethoxy)-ethoxy]-acetyl)-(γGlu)-CO- |
| | (CH₂)₁₆-CO₂H)AQ-αMe4Pal-EFIe-αMeY-LLEGSPSSGAPPPS |
| 422 | Y-Aib-QGT-αMeF(2F)-TSDY-αMeS-I-αMeL-LD-Orn-K(2-[2-(2-amino-ethoxy)-ethoxy]-acetyl)-(γGlu)-CO- |
| | (CH₂)₁₆-CO₂H)AQ-αMe4Pal-Om-FIE-αMeY-LLEGSPSSGAPPPS |
| 423 | Y-Aib-QGT-αMeF(2F)-TSDY-αMeS-I-αMeL-LD-Orn-K(2-[2-(2-amino-ethoxy)-ethoxy]-acetyl)-(γGlu)-CO- |
| | (CH₂)₁₆-CO₂H)AQ-αMe4Pal-Orn-FIe-αMeY-LLEGSPSSGAPPPS |
| 424 | Y-Aib-QGT-αMeF(2F)-TSDY-αMeS-I-αMeL-LD-Orn-K(2-[2-(2-amino-ethoxy)-ethoxy]-acetyl)-(γGlu)-CO- |
| | (CH₂)₁₆-CO₂H)AQ-αMe4Pal-EFIe-αMeY-LIEGSPSSGAPPPS |
| 425 | Y-Aib-QGT-αMeF(2F)-TSDY-αMeS-I-αMeL-LD-Orn-K(2-[2-(2-amino-ethoxy)-ethoxy]-acetyl)-(γGlu)-CO- |
| | (CH₂)₁₆-CO₂H)AQ-αMe4Pal-Orn-FIE-αMeY-LIEGSPSSGAPPPS |
| 426 | Y-Aib-QGT-αMeF(2F)-TSDY-αMeS-I-αMeL-LD-Orn-K(2-[2-(2-amino-ethoxy)-ethoxy]-acetyl)-(γGlu)-CO- |
| | (CH₂)₁₆-CO₂H)AQ-αMe4Pal-Orn-FIe-αMeY-LIEGSPSSGAPPPS |
| 427 | Y-Aib-QGT-αMeF(2F)-TSDY-αMeS-I-αMeL-LD-Or-K(2-[2-(2-amino-ethoxy)-ethoxy]-acetyl)-(γGlu)-CO- |
| | (CH₂)₁₆-CO₂H)AQ-Aib-QFIE-αMeY-LLEGSPSSGAPPPS |
| 428 | Y-Aib-QGT-αMeF(2F)-TSDY-αMeS-I-αMeL-LD-Orn-K(2-[2-(2-amino-ethoxy)-ethoxy]-acetyl)-(γGlu)-CO- |
| | (CH₂)₁₆-CO₂H)AQ-Aib-Orn-FIe-αMeY-LLEGSPSSGAPPPS |
| 429 | Y-Aib-QGT-αMeF(2F)-TSDY-αMeS-I-αMeL-LD-Orn-K(2-[2-(2-amino-ethoxy)-ethoxy]-acetyl)-(γGlu)-CO- |
| | (CH₂)₁₆-CO₂H)AQ-Aib-Orn-FIE-αMeY-LLEGSPSSGAPPPS |
| 430 | Y-Aib-QGT-αMeF(2F)-TSDY-αMeS-I-αMeL-LD-Orn-K(2-[2-(2-amino-ethoxy)-ethoxy]-acetyl)-(γGlu)-CO- |
| | (CH₂)₁₆-CO₂H)AQ-Aib-Orn-FIq-αMeY-LLEGSPSSGAPPPS |
| 431 | Y-Aib-QGT-αMeF(2F)-TSDY-αMeS-I-αMeL-LD-Orn-K(2-[2-(2-amino-ethoxy)-ethoxy]-acetyl)-(γGlu)-CO- |
| | (CH₂)₁₆-CO₂H)AQ-Aib-Orn-FIQ-αMeY-LLEGSPSSGAPPPS |
| 432 | Y-Aib-QGT-αMeF(2F)-TSDY-αMeS-I-αMeL-LD-Orn-K(2-[2-(2-amino-ethoxy)-ethoxy]-acetyl)-(γGlu)-CO- |
| | (CH₂)₁₆-CO₂H)AQ-Aib-EFIe-αMeY-LLEGSPSSGAPPPS |
| 433 | Y-Aib-QGT-αMeF(2F)-TSDY-αMeS-I-αMeL-LD-Orn-K(2-[2-(2-amino-ethoxy)-ethoxy]-acetyl)-(γGlu)-CO- |
| | (CH₂)₁₆-CO₂H)AQ-Aib-EFIE-αMeY-LLEGSPSSGAPPPS |
| 434 | Y-Aib-QGT-αMeF(2F)-TSDY-αMeS-I-αMeL-LD-Or-K(2-[2-(2-amino-ethoxy)-ethoxy]-acetyl)-(γGlu)-CO- |
| | (CH₂)₁₆-CO₂H)AQ-Aib-EFIq-αMeY-LLEGSPSSGAPPPS |
| 435 | H-Ac4c-QGT-αMeF(2F)-TSDY-αMeS-I-αMeL-LD-Om-K(2-[2-(2-amino-ethoxy)-ethoxy]-acetyl)-(γGlu)-CO- |
| | (CH₂)₁₆-CO₂H)AQ-αMe4Pal-EFIE-αMeY-LIEGSPSSGAPPPS |
| 436 | YaQGT-αMeF(2F)-TSDY-αMeS-I-αMeL-LD-Orn-K(2-[2-(2-amino-ethoxy)-ethoxy]-acetyl)-(γGlu)-CO-(CH₂)₁₆- |
| | CO₂H)AQ-αMe4Pal-EFIE-αMeY-LIEGSPSSGAPPPS |
| 437 | YaQGT-αMeF(2F)-TSDY-αMeS-I-αMeL-LD-Orn-K(2-[2-(2-amino-ethoxy)-ethoxy]-acetyl)-(γGlu)-CO-(CH₂)₁₆- |
| | CO₂H)AQ-αMe4Pal-Or-FIE-αMeY-LIEGSPSSGAPPPS |
| 438 | YaQGT-αMeF(2F)-TSDY-αMeS-I-αMeL-LD-Orn-K(2-[2-(2-amino-ethoxy)-ethoxy]-acetyl)-(γGlu)-CO-(CH₂)₁₆- |
| | CO₂H)AQ-αMe4Pal-Orn-FIe-αMeY-LIEGSPSSGAPPPS |
| 439 | YaQGT-αMeF(2F)-TSDY-αMeS-I-αMeL-LD-Orn-K(2-[2-(2-amino-ethoxy)-ethoxy]-acetyl)-(γGlu)-CO-(CH₂)₁₆- |
| | CO₂H)AQ-αMe4Pal-EFIE-αMeY-LLEGSPSSGAPPPS |
| 440 | YaQGT-αMeF(2F)-TSDY-αMeS-I-αMeL-LD-Orn-K(2-[2-(2-amino-ethoxy)-ethoxy]-acetyl)-(γGlu)-CO-(CH₂)₁₆- |
| | CO₂H)AQ-αMe4Pal-EFIe-αMeY-LLEGSPSSGAPPPS |
| 441 | YaQGT-αMeF(2F)-TSDY-αMeS-I-αMeL-LD-Orn-K(2-[2-(2-amino-ethoxy)-ethoxy]-acetyl)-(γGlu)-CO-(CH₂)₁₆- |
| | CO₂H)AQ-αMe4Pal-Orn-FIE-αMeY-LLEGSPSSGAPPPS |
| 442 | YaQGT-αMeF(2F)-TSDY-αMeS-I-αMeL-LD-Orn-K(2-[2-(2-amino-ethoxy)-ethoxy]-acetyl)-(γGlu)-CO-(CH₂)₁₆- |
| | CO₂H)AQ-Aib-Orn-Flq-αMeY-LLEGSPSSGAPPPS |
| 443 | YaQGT-αMeF(2F)-TSDY-αMeS-I-αMeL-LD-Orn-K(2-[2-(2-amino-ethoxy)-ethoxy]-acetyl)-(γGlu)-CO-(CH₂)₁₆- |
| | CO₂H)AQ-Aib-Om-FIQ-αMeY-LLEGSPSSGAPPPS |
| 444 | YaQGT-αMeF(2F)-TSDY-αMeS-I-αMeL-LD-Orn-K(2-[2-(2-amino-ethoxy)-ethoxy]-acetyl)-(γGlu)-CO-(CH₂)₁₆- |
| | CO₂H)AQ-Aib-Orn-FIE-αMeY-LIEGSPSSGAPPPS |
| 445 | Y-Aib-QGT-αMeF(2F)-TSD-4Pal-SI-αMeL-LD-Om-K(2-[2-(2-amino-ethoxy)-ethoxy]-acetyl)-(γGlu)-CO-(CH₂)₁₆- |
| | CO₂H)AQ-αMe4Pal-Orn-FIE-αMeY-LIEGSPSSGAPPPS |
| 446 | Y-Aib-QGT-αMeF(2F)-TSD-4Pal-αMeS-I-αMeL-LD-Om-K(2-[2-(2-amino-ethoxy)-ethoxy]-acetyl)-(γGlu)-CO- |
| | (CH₂)₁₆-CO₂H)AQ-αMe4Pal-Om-FIe-αMeY-LIEGSPSSGAPPPS |
| 447 | Y-Aib-QGT-αMeF(2F)-TSD-4Pal-αMeS-I-αMeL-LD-Or-K(2-[2-(2-amino-ethoxy)-ethoxy]-acetyl)-(γGlu)-CO- |
| | (CH₂)₁₆-CO₂H)AQ-αMe4Pal-EFIE-αMeY-LIEGSPSSGAPPPS |
| 448 | Y-Aib-QGT-αMeF(2F)-TSD-4Pal-SI-αMeL-LD-Orn-K(2-[2-(2-amino-ethoxy)-ethoxy]-acetyl)-(γGlu)-CO-(CH₂)₁₆- |
| | CO₂H)AQ-αMe4Pal-EFIE-αMeY-LIEGSPSSGAPPPS |
| 449 | Y-Aib-QGT-αMeF(2F)-TSDY-αMeS-I-αMeL-LD-Orn-K(2-[2-(2-amino-ethoxy)-ethoxy]-acetyl)-(γGlu)-CO- |
| | (CH₂)₁₆-CO₂H)AQ-Aib-Orn-FIE-αMeY-LIEGSPSSGAPPPS |
| 450 | Y-Aib-QGT-αMeF(2F)-TSD-4Pal-αMeS-I-αMeL-LD-Om-K(2-[2-(2-amino-ethoxy)-ethoxy]-acetyl)-(γGlu)-CO- |
| | (CH₂)₁₆-CO₂H)AQ-αMe4Pal-EFIe-αMeY-LIEGSPSSGAPPPS |
| 451 | YaQGT-αMeF(2F)-TSDY-αMeS-I-αMeL-LD-Orn-K(2-[2-(2-amino-ethoxy)-ethoxy]-acetyl)₂-(γGlu)-CO-(CH₂)₁₆- |
| | CO₂H)AQ-αMe4Pal-Orn-FIE-αMeY-LIEGSPSSGAPPPS |
| 452 | YaQGT-αMeF(2F)-TSDY-αMeS-I-αMeL-LD-Orn-K(2-[2-(2-amino-ethoxy)-ethoxy]-acetyl)₂-(γGlu)-CO-(CH₂)₁₆- |
| | CO₂H)AQ-αMe4Pal-Orn-FIE-αMeY-LLEGSPSSGAPPPS |
| 453 | Y-Aib-QGT-αMeF(2F)-TSDY-αMeS-I-αMeL-LD-Orn-K(2-[2-(2-amino-ethoxy)-ethoxy]-acetyl)-(γGlu)-CO- |
| | (CH₂)₁₆-CO₂H)AQ-Aib-Orn-FIe-αMeY-LIEGSPSSGAPPPS |
| 454 | NMeY-Aib-QGT-αMeF(2F)-TSDY-αMeS-I-αMeL-LD-Orn-K(2-[2-(2-amino-ethoxy)-ethoxy]-acetyl)₂-(γGlu)-CO- |
| | (CH₂)₁₆-CO₂H)AQ-αMe4Pal-EFIE-αMeY-LIEGSPSSGAPPPS |
| 455 | Y-Aib-QGT-αMeF(2F)-TSDY-αMeS-I-αMeL-LD-Or-K(2-[2-(2-amino-ethoxy)-ethoxy]-acetyl)₂-(γGlu)-CO- |
| | (CH₂)₁₈-CO₂H)AQ-αMe4Pal-Orn-FIe-αMeY-LIEGSPSSGAPPPS |
| 456 | Y-Aib-QGT-αMeF(2F)-TSDY-αMeS-I-αMeL-LD-Orn-K(2-[2-(2-amino-ethoxy)-ethoxy]-acetyl)₂-(γGlu)-CO- |
| | (CH₂)₁₈-CO₂H)AQ-αMe4Pal-Or-FIQ-αMeY-LIEGSPSSGAPPPS |
| 457 | Y-Aib-QGT-αMeF(2F)-TSDY-αMeS-I-αMeL-LD-Orn-K(2-[2-(2-amino-ethoxy)-ethoxy]-acetyl)₂-(γGlu)-CO- |
| | (CH₂)₁₆-CO₂H)AQ-αMe4Pal-Om-FIE-αMeY-LIE-Aib-SPSSGAPPPS |
| 458 | Y-Aib-QGT-αMeF(2F)-TSDY-αMeS-I-αMeL-LD-Orn-K(2-[2-(2-amino-ethoxy)-ethoxy]-acetyl)₂-(γGlu)-CO- |
| | (CH₂)₁₆-CO₂H)AQ-αMe4Pal-Or-FIQ-αMeY-LIE-Aib-SPSSGAPPPS |
| 1039 | Y-Aib-EGT-αMeF(2F)-TSD-Y-Aib-I-αMeL-LD-Orn-K(2-[2-(2-amino-ethoxy)-ethoxy]-acetyl)₂-(γGlu)-CO-(CH₂)₁₆- |
| | CO₂H)AQ-Aib-Orn-FIE-αMeY-LIEGSPSSGAPPPS |
| 1040 | Y-Aib-EGT-αMeF(2F)-TSDY-Aib-I-αMeL-LD-Orn-K(2-[2-(2-amino-ethoxy)-ethoxy]-acetyl)₂-(γGlu)-CO-(CH₂)₁₆- |
| | CO₂H)AQ-Aib-EFIE-αMeY-LIAGGG |
| 1041 | Y-Aib-EGT-αMeF(2F)-TSDY-Aib-I-αMeL-LD-Orn-K(2-[2-(2-amino-ethoxy)-ethoxy]-acetyl)₂-(γGlu)-CO-(CH₂)₁₆- |
| | CO₂H)AQ-Aib-EFIE-αMeY-LIE-Aib-GG |
| 1042 | Y-Aib-EGT-αMeF(2F)-TSDY-Aib-I-αMeL-LD-Orn-K(2-[2-(2-amino-ethoxy)-ethoxy]-acetyl)₂-(γGlu)-CO-(CH₂)₁₄- |
| | CO₂H)AQ-Aib-EFIE-αMeY-LIEGSPSSGAPPPS |
| 1043 | Y-Aib-QGT-αMeF(2F)-TSDY-αMeS-I-αMeL-LD-Orn-K(2-[2-(2-amino-ethoxy)-ethoxy]-acetyl)₂-(γGlu)-CO-(CH₂)₁₆- |
| | CO₂H)AQ-αMe4Pal-Orn-FIE-αMeY-L VEGSPSSGAPPPS |
| 1044 | Y-Aib-QGT-αMeF(2F)-TSD-4Pal-αMeS-I-αMeL-LD-Orn-K(2-[2-(2-amino-ethoxy)-ethoxy]-acetyl)-(γGlu)-CO-(CH₂)₁₆- |
| | CO₂H)AQ-αMe4Pal-Orn-FIE-αMeY-LIEGSPSSGAPPPS |
| 1045 | Y-Aib-QGT-αMeF(2F)-TSD-4Pal-αMeS-I-αMeL-LD-Orn-K(2-[2-(2-amino-ethoxy)-ethoxy]-acetyl)-(γGlu)-CO-(CH₂)₁₆- |
| | CO₂H)AQ-αMe4Pal-Orn-FIE-αMeY-L VEGSPSSGAPPPS |
| 1046 | Y-Aib-QGT-αMeF(2F)-TSDY-αMeS-I-αMeL-LD-Orn-K(2-[2-(2-amino-ethoxy)-ethoxy]-acetyl)-(γGlu)-CO-(CH₂)₁₆- |
| | CO₂H)AQ-αMe4Pal-Orn-FIE-αMeY-L VEGSPSSGAPPPS |
| 1047 | Y-Aib-QGT-αMeF(2F)-TSD-4Pal-SI-αMeL-LD-Or-K(ϵKϵK-(γGlu)-CO-(CH₂)₁₆-CO₂H)AQ-αMe4Pal-Orn-FIE-αMeY- |
| | LIEGSPSSGAPPPS |
| 1048 | Y-Aib-QGT-aMcF(2F)-TSDY-αMeS-I-αMeL-LD-Orn-K(ϵKϵK-(γGlu)-CO-(CH₂)₁₆-CO>H)AQ-αMe4Pal-Orn-FIE-αMe Y- |
| | LIEGSPSSGAPPPS |
| 1049 | Y-Aib-QGT-αMeF(2F)-TSD-4Pal-αMeS-I-αMeL-LD-Orn-K(ϵKϵK-(γGlu)-CO-(CH₂)₁₆-CO₂H)AQ-αMe4Pal-EFIE-αMeY- |
| | LIEGSPSSGAPPPS |
| 1050 | Y-Aib-QGT-αMeF(2F)-TSDY-αMeS-I-αMeL-LD-Or-K(ϵKϵK-(γGlu)-CO-(CH₂)₁₆-CO₂H)AQ-αMe4Pal-EFIE-αMe Y- |
| | LIEGSPSSGAPPPS |
| 1051 | Y-Aib-QGT-αMeF(2F)-TSDY-αMeS-I-αMeL-LD-Orn-K(2-[2-(2-amino-ethoxy)-ethoxy]-acetyl)-(γGlu)-CO-(CH₂)₁₆- |
| | CO₂H)AQ-αMe4Pal-EFIE-αMeY-LVEGSPSSGAPPPS |
| 1052 | YaQGT-αMeF(2F)-TSD-4Pal-αMeS-I-αMeL-LD-Orn-K(2-[2-(2-amino-ethoxy)-ethoxy]-acetyl)-(γGlu)-CO-(CH₂)₁₆- |
| | CO₂H)AQ-αMe4Pal-Orn-FIE-QMeY-LIEGSPSSGAPPPS |
| 1053 | YaQGT-αMeF(2F)-TSD-4Pal-SI-αMeL-LD-Orn-K(2-[2-(2-amino-ethoxy)-ethoxy]-acetyl)-(γGlu)-CO-(CH₂)₁₆-CO₂H)AQ- |
| | αMe4Pal-Orn-FIE-αMeY-LIEGSPSSGAPPPS |
| 1054 | YaQGT-αMeF(2F)-TSDY-αMeS-I-αMeL-LD-Orn-K(2-[2-(2-amino-ethoxy)-ethoxy]-acety1)-(γGlu)-CO-(CH₂)₁₆-CO₂H)AQ- |
| | αMe4Pal-Or-FIE-αMe Y-LIEQSPSSGAPPPS |
| 1055 | Y-αMeS-QGT-αMeF(2F)-TSDY-αMeS-I-αMeL-LD-Orn-K(2-[2-(2-amino-ethoxy)-ethoxy]-acety1)-(γGlu)-CO-(CH₂)₁₆- |
| | CO₂H)AQ-αMe4Pal-Orn-FIE-αMeY-LIEGSPSSGAPPPS |
| 1056 | Y-αMeS-QGT-αMeF(2F)-TSD-4Pal-αMeS-I-αMeL-LD-Orn-K(2-[2-(2-amino-ethoxy)-ethoxy]-acetyl)-(γGlu)-CO-(CH₂)₁₆- |
| | CO₂H)AQ-αMe4Pal-Orn-FIE-QMeY-LIEGSPSSGAPPPS |
| 1057 | Y-αMeS-QGT-αMeF(2F)-TSDY-αMeS-I-αMeL-LD-Or-K(2-[2-(2-amino-ethoxy)-ethoxy]-acetyl)₂-(γGlu)-CO-(CH₂)₁₆- |
| | CO₂H)AQ-αMe4Pal-Orn-FIE-αMeY-LIEGSPSSGAPPPS |
| 1058 | Y-Iva-QGT-αMeF(2F)-TSDY-αMeS-I-αMeL-LD-Orn-K(2-[2-(2-amino-ethoxy)-ethoxy]-acetyl)-(γGlu)-CO-(CH₂)₁₆- |
| | CO₂H)AQ-αMe4Pal-Orn-FIE-αMeY-LIEGSPSSGAPPPS |
| 1059 | Y-Iva-QGT-αMeF(2F)-TSD-4Pal-αMeS-I-αMeL-LD-Orn-K(2-[2-(2-amino-ethoxy)-ethoxy]-acetyl)-(γGlu)-CO-(CH₂)₁₆- |
| | CO₂H)AQ-αMe4Pal-Orn-FIE-αMeY-LIEGSPSSGAPPPS |
| 1060 | Y-Iva-QGT-αMeF(2F)-TSDY-αMeS-I-αMeL-LD-Orn-K(2-[2-(2-amino-ethoxy)-ethoxy]-acetyl)₂-(γGlu)-CO-(CH₂)₁₆- |
| | CO₂H)AQ-αMe4Pal-Orn-FIE-αMeY-LIEGSPSSGAPPPS |
| 1061 | Y-Ac4c-QGT-αMeF(2F)-TSD-4Pal-αMeS-I-αMeL-LD-Orn-K(2-[2-(2-amino-ethoxy)-ethoxy]-acetyl)-(γGlu)-CO-(CH₂)₁₆- |
| | CO₂H)AQ-αMe4Pal-EFIE-αMeY-LIEGSPSSGAPPPS |
| 1062 | Y-Ac4c-QGT-αMeF(2F)-TSDY-αMeS-I-αMeL-LD-Om-K(2-[2-(2-amino-ethoxy)-ethoxy]-acetyl)₂-(γGlu)-CO-(CH₂)₁₆- |
| | CO₂H)AQ-αMe4Pal-EFIE-αMeY-LIEGSPSSGAPPPS |
| 1063 | Y-Aib-QGT-αMeF(2F)-TSDY-αMeS-I-αMeL-LD-Orn-K(ϵKϵK-(γGlu)-CO-(CH₂)₁₆-CO₂H)AQ-αMe4Pal-EFIe-αMeY- |
| | LIEGSPSSGAPPPS |
| 1064 | Y-Aib-QGT-αMeF(2F)-TSDY-αMeS-I-αMeL-LD-Orn-K(2-[2-(2-amino-ethoxy)-ethoxy]-acetyl)-(γGlu)-CO-(CH₂)₁₆- |
| | CO₂H)AQ-αMeL-Orn-FIe-αMeY-LIEGSPSSGAPPPS |
| 1065 | Y-Aib-QGT-αMeF(2F)-TSDY-αMeS-I-αMeL-LD-Orn-K(2-[2-(2-amino-ethoxy)-ethoxy]-acetyl)-(γGlu)-CO-(CH₂)₁₆- |
| | CO₂H)AQ-αMeL-Iva-FIe-αMeY-LIEGSPSSGAPPPS |
| 1066 | Y-Aib-QGT-αMeF(2F)-TSD-4Pal-αMeS-I-αMeL-LD-Orn-K(2-[2-(2-amino-ethoxy)-ethoxy]-acetyl)-(γGlu)-CO-(CH₂)₁₆- |
| | CO₂H)AQ-αMeL-Orn-FIe-αMeY-LIEGSPSSGAPPPS |
| 1067 | Y-Aib-QGT-αMeF(2F)-TSD-4Pal-αMeS-I-αMeL-LD-Orn-K(2-[2-(2-amino-ethoxy)-ethoxy]-acetyl)-(γGlu)-CO-(CH₂)₁₆- |
| | CO₂H)AQ-αMeL-Iva-FIe-αMeY-LIEGSPSSGAPPPS |
| 1068 | Y-Aib-QGT-αMeF(2F)-TSDY-αMeS-I-αMeL-LD-Orn-K(2-[2-(2-amino-ethoxy)-ethoxy]-acetyl)₂-(γGlu)-CO-(CH₂)₁₆- |
| | CO₂H)AQ-αMe4Pal-EFIE-MeY-LIAGSPSSGAPPPS |
| 1069 | Y-Aib-QGT-αMeF(2F)-TSDY-αMeS-I-αMeL-LD-Orn-K(2-[2-(2-amino-ethoxy)-ethoxy]-acetyl)-(γGlu)-CO-(CH₂)₁₆- |
| | CO₂H)AQ-αMe4Pal-EFIE-αMeY-LIAGSPSSGAPPPS |
| 1070 | Y-Aib-QGT-αMeF(2F)-TSDY-αMeS-I-αMeL-LD-Orn-K(2-[2-(2-amino-ethoxy)-ethoxy]-acetyl)₂-(γGlu)-CO-(CH₂)₁₆- |
| | CO₂H)AQ-αMe4Pal-EFIE-αMeY-LIEaSPSSGAPPPS |
| 1071 | Y-Aib-QGT-aMcF(2F)-TSDY-αMeS-I-αMeL-LD-Orn-K(2-[2-(2-amino-ethoxy)-ethoxy]-acetyl)-(γGlu)-CO-(CH₂)₁₆- |
| | CO₂H)AQ-αMe4Pal-EFIe-αMeY-LIAGSPSSGAPPPS |
| 1072 | YaQGT-αMeF(2F)-TSDY-αMeS-I-αMeL-LD-Orn-K(2-[2-(2-amino-ethoxy)-ethoxy]-acetyl)₂-(γGlu)-CO-(CH₂)₁₆- |
| | CO₂H)AQ-αMe4Pal-Orn-FIE-αMeY-LIAGSPSSGAPPPS |
| 1073 | Y-Aib-QGT-αMeF(2F)-TSDY-αMeS-I-αMeL-LD-Orn-K(2-[2-(2-amino-ethoxy)-ethoxy]-acety1)-(γGlu)-CO-(CH₂)₁₆- |
| | CO₂H)AQ-Aib-Orn-FIe-αMeY-LIAGSPSSGAPPPS |
| 1074 | YaQGT-αMeF(2F)-TSDY-αMeS-I-αMeL-LD-Orn-K(2-[2-(2-amino-ethoxy)-ethoxy]-acetyl)₂-(γGlu)-CO-(CH₂)₁₆- |
| | CO₂H)AQ-αMe4Pal-Orn-FIE-αMeY-LIEaSPSSGAPPPS |
| 1075 | Y-Aib-QGT-αMeF(2F)-TSDY-αMeS-I-αMeL-LD-Orn-K(2-[2-(2-amino-ethoxy)-ethoxy]-acetyl)₂-(γGlu)-CO-(CH₂)₁₆- |
| | CO₂H)AQ-αMe4Pal-SFIE-αMeY-LIEGSPSSGAPPPS |
| 1076 | Y-Aib-QGT-aMcF(2F)-TSDY-αMeS-I-αMeL-LD-Orn-K(2-[2-(2-amino-ethoxy)-ethoxy]-acetyl)₂-(γGlu)-CO-(CH₂)₁₆- |
| | CO₂H)AQ-Aib-SFIE-αMeY-LIEGSPSSGAPPPS |
| 1077 | Y-Aib-QGT-αMeF(2F)-TSDY-αMeS-I-αMeL-LD-Orn-K(2-[2-(2-amino-ethoxy)-ethoxy]-acetyl)₂-(γGlu)-CO-(CH₂)₁₆- |
| | CO₂H)AQ-4Pal-AFIE-αMeY-LIEGSPSSGAPPPS |
| 1078 | Y-Aib-QGT-αMeF(2F)-TSDY-αMeS-I-αMeL-LD-Orn-K(2-[2-(2-amino-ethoxy)-ethoxy]-acetyl)-(γGlu)-CO-(CH₂)₁₆- |
| | CO₂H)AQ-αMeF-Aib-FIe-αMeY-LIEGSPSSGAPPPS |
| 1079 | Y-Aib-QGT-αMeF(2F)-TSDY-αMeS-I-αMeL-LD-Orn-K(2-[2-(2-amino-ethoxy)-ethoxy]-acetyl)-(γGlu)-CO-(CH₂)₁₆- |
| | CO₂H)AQ-Iva-AFIe-αMeY-LIEGSPSSGAPPPS |
| 1080 | Y-Aib-QGT-αMeF(2F)-TSDY-αMeS-I-αMeL-LD-Orn-K(2-[2-(2-amino-ethoxy)-ethoxy]-acetyl)₂-(γGlu)-CO-(CH₂)₁₆- |
| | CO₂H)AQ-Aib-EFIE-αMeY-LIEGSPSSGAPPPS |
| 1081 | Y-Aib-QGT-αMeF(2F)-TSDY-αMeS-I-αMeL-LD-Orn-K(2-[2-(2-amino-ethoxy)-ethoxy]-acetyl)-(γGlu)-CO-(CH₂)₁₆- |
| | CO₂H)AQ-αMe4Pal-EFIe-αMeY-LIE-Aib-SPSSGAPPPS |
| 1082 | Y-Aib-QGT-αMeF(2F)-TSDY-αMeS-I-αMeL-LD-Or-K(2-[2-(2-amino-ethoxy)-ethoxy]-acetyl)-(γGlu)-CO-(CH₂)₁₆- |
| | CO₂H)AQ-αMeL-Orn-FIe-αMeY-LIAaSPSSGAPPPS |
| 1083 | Y-Aib-QGT-αMeF(2F)-TSD-4Pal-αMeS-I-αMeL-LD-Orn-K(2-[2-(2-amino-ethoxy)-ethoxy]-acetyl)-(γGlu)-CO-(CH₂)₁₆- |
| | CO₂H)AQ-αMe4Pal-EFIE-αMeY-LIE-Aib-SPSSGAPPPS |
| 1084 | Y-Aib-QGT-αMeF(2F)-TSD-4Pal-αMeS-I-αMeL-LD-Orn-K(2-[2-(2-amino-ethoxy)-ethoxy]-acetyl)-(γGlu)-CO-(CH₂)₁₆- |
| | CO₂H)AQ-αMe4Pal-EFIE-αMeY-LIAGSPSSGAPPPS |
| 1085 | Y-Aib-QGT-αMeF(2F)-TSD-4Pal-αMeS-I-αMeL-LD-Orn-K(2-[2-(2-amino-ethoxy)-ethoxy]-acety1)-(γGlu)-CO-(CH₂)₁₆- |
| | CO₂H)AQ-αMe4Pal-EFIE-αMeY-LIAaSPSSGAPPPS |
| 1086 | Y-Aib-QGT-αMeF(2F)-TSD-4Pal-αMeS-I-αMeL-LD-Orn-K(2-[2-(2-amino-ethoxy)-ethoxy ]-acetyl)-(γGlu)-CO-(CH₂)₁₆- |
| | CO₂H)AQ-αMeL-Iva-FIe-αMeY-LIA-Aib-SPSSGAPPPS |
| 1087 | Y-Aib-QGT-αMeF(2F)-TSD-4Pal-αMeS-I-αMeL-LD-Orn-K(2-[2-(2-amino-ethoxy)-ethoxy]-acetyl)₂-(γGlu)-CO-(CH₂)₁₆- |
| | CO₂H)AQ-αMe4Pal-SFIE-αMeY-LIEGSPSSGAPPPS |
| 1088 | Y-Aib-QGT-αMeF(2F)-TSD-4Pal-αMeS-I-αMeL-LD-Orn-K(2-[2-(2-amino-ethoxy)-ethoxy]-acetyl)₂-(γGlu)-CO-(CH₂)₁₆- |
| | CO₂H)AQ-αMe4Pal-SFIE-αMeY-LIE-Aib-SPSSGAPPPS |
| 1089 | Y-Aib-QGT-αMeF(2F)-TSDY-αMeS-I-αMeL-LD-Orn-K(2-[2-(2-amino-ethoxy)-ethoxy]-acetyl)₂-(γGlu)-CO-(CH₂)₁₆- |
| | CO₂H)AQ-αMe4Pal-EFIE-αMeY-LIEGGG |
| 1090 | Y-Aib-QGT-αMeF(2F)-TSDY-αMeS-I-αMeL-LD-Orn-K(2-[2-(2-amino-ethoxy)-ethoxy]-acetyl)₂-(γGlu)-CO-(CH₂)₁₆- |
| | CO₂H)AQ-αMe4Pal-EFIE-αMeY-LIAGGG |
| 1091 | Y-Aib-QGT-αMeF(2F)-TSDY-αMeS-I-αMeL-LD-Orn-K(2-[2-(2-amino-ethoxy)-ethoxy]-acetyl)-(γGlu)-CO-(CH₂)₁₆- |
| | CO₂H)AQ-αMe4Pal-EFIE-αMeY-LIEGGG |
| 1092 | Y-Aib-QGT-αMeF(2F)-TSDY-αMeS-I-αMeL-LD-Orn-K(2-[2-(2-amino-ethoxy)-ethoxy]-acety1)-(γGlu)-CO-(CH₂)₁₆- |
| | CO₂H)AQ-αMe4Pal-EFIe-αMeY-LIEGGG |
| 1093 | Y-Ac4c-QGT-αMeF(2F)-TSDY-αMeS-I-αMeL-LD-Om-K(2-[2-(2-amino-ethoxy)-ethoxy]-acetyl)-(γGlu)-CO-(CH₂)₁₆- |
| | CO₂H)AQ-αMe4Pal-EFIE-αMeY-LIEGGG |
| 1094 | Y-Aib-QGT-αMeF(2F)-TSD-4Pal-αMeS-I-αMeL-LD-Orn-K(2-[2-(2-amino-ethoxy)-ethoxy]-acetyl)-(γGlu)-CO-(CH₂)₁₆- |
| | CO₂H)AQ-αMe4Pal-EFIE-αMeY-LIEGGG |
| 1095 | Y-Aib-QGT-αMeF(2F)-TSDY-αMeS-I-QMeL-LD-Orn-K(2-[2-(2-amino-ethoxy)-ethoxy]-acetyl)₂-(γGlu)-CO-(CH₂)₁₄- |
| | CO₂H)AQ-αMe4Pal-EFIE-αMeY-LIEGSPSSGAPPPS |
| 1096 | Y-Aib-QGT-αMeF(2F)-TSD-4Pal-αMeS-I-αMeL-LD-Orn-K(2-[2-(2-amino-ethoxy)-ethoxy]-acetyl)-(γGlu)-CO-(CH₂)₁₄- |
| | CO₂H)AQ-αMe4Pal-EFIE-αMeY-LIEGSPSSGAPPPS |
| 1097 | Y-Aib-QGT-αMeF(2F)-TSDY-αMeS-I-αMeL-LD-Or-K(2-[2-(2-amino-ethoxy)-ethoxy]-acetyl)-(γGlu)-CO-(CH₂)₁₄- |
| | CO₂H)AQ-αMe4Pal-EFIE-αMeY-LIEGSPSSGAPPPS |
| 1098 | Y-Aib-QGT-αMeF(2F)-TSD-4Pal-αMeS-I-αMeL-LD-Orn-K(2-[2-(2-amino-ethoxy)-ethoxy]-acetyl)-(γGlu)-CO-(CH₂)₁₄- |
| | CO₂H)AQ-αMe4Pal-EFIe-αMeY-LIEGSPSSGAPPPS |

### Other Definitions and Abbreviations

[0390] The amino acid sequences of the therapeutic polypeptides described herein incorporate naturally occurring amino acids, typically depicted herein using standard one letter codes (e.g., L=leucine), as well as alpha-methyl substituted residues of natural amino acids (e.g., α-methyl leucine (αMeL), and certain other non-natural amino acids, such as alpha amino isobutyric acid (Aib). The structures of these amino acids are depicted below:

[chemical structure]

[chemical structure]

[0391] As used herein “Orn” means L-ornithine. As used herein “4-Pal” or “4Pal” means 3-(4-Pyridyl)-L-alanine or (S)-2-amino-3-(pyridin-4-yl)propanoic acid. As used herein “3-Pal” or “3Pal” means 3-(3-Pyridyl)-L-alanine or (S)-2-amino-3-(pyridin-3-yl)propanoic acid. As used herein “αMe-4-Pal” or “αMe4Pal” means alpha-methyl-3-(4-Pyridyl)-L-alanine. As used herein “αMeY” means alpha-methyl-L-tyrosine. As used herein “αMeL” means alpha-methyl-leucine. As used herein, “Ac3c” means 1-aminocyclopropanecarboxylic acid. As used herein, “Ac4c” means 1-Aminocyclobutane-1-carboxylic acid. As used herein “D-Ala” and “a” each means D-alanine. As used herein “D-Glu” and “e” each means D-glutamic acid. As used herein “Aib” means 2-Aminoisobutyric Acid. As used herein, “NMeY” means N-methyl-tyrosine. As used herein “Dap” means (S)-2,3-diaminopropanoic acid. As used herein “Dab” means (S)-2,4-diaminobutanoic acid. As used herein “Hyp” means Hydroxy-L-proline. As used herein “K(Ac)” means N⁶-acetyl-L-lysine. As used herein “γGlu” means gamma L-glutamic acid. As used herein “Aad” means (S)-2-aminohexanedioic acid. As used herein “F(4CN)” means 4-cyano-L-phenylalanine or (S)-2-amino-3-(4-cyanophenyl)propanoic acid. As used herein “F(4NO₂)” means 4-nitro-L-phenylalanine or (S)-2-amino-3-(4-nitrophenyl)propanoic acid. As used herein “αMeS” means alpha-methyl-L-serine. As used herein “αMeF” means alpha-methyl-L-phenylalanine. As used herein “αMeF(2F)” means alpha-methyl-2-fluoro-L-phenylalanine or (S)-2-amino-3-(2-fluorophenyl)-2-methylpropanoic acid. As used herein “L-Iva” and “Iva” mean L-isovaline. As used herein “D-Gln” and “q” each means D-glutamine.

[0392] Certain abbreviations used herein are defined as follows: “AcOH” refers to acetic acid; “ACN” refers to acetonitrile; “BEA” refers to 4-(bis(2-((((9H-fluoren-9-yl)methoxy)carbonyl)amino)ethyl)amino)-4-oxobutanoic acid; “Boc” refers to tert-butoxycarbonyl; “t-Bu” refers to tert-butyl; “DABA” refers to 3,5-diaminobenzoic acid; “DCM” refers to dichloromethane; ‘DMAP” refers to 4-dimethylaminopyridine; “DIC” refers to diisopropylcarbodiimide; “Et2O” refers to diethyl ether; “DIEA” refers to diisopropylethylamine; “DMF” refers to dimethylformamide; “DMAP” refers to 4-dimethylaminopyridine; “ivDde” refers to 1-(4,4-dimethyl-2,6-dioxocyclohex-1-ylidene)-3-methylbutyl; “EtOH” refers to ethanol; “EtOAc” refers to ethyl acetate; “eq” refers to equivalents; “Fmoc” refers to fluorenylmethyloxycarbonyl; “FPLC” refers to fast protein liquid chromatography; “HFIP” refers to hexafluoroisopropanol; “IPA” refers to isopropyl alcohol; “MalDab” refers to (S)-2-((tert-butoxycarbonyl)amino)-4-(2,5-dioxo-2,5-dihydro-1H-pyrrol-1-yl)butanoic acid; “MalDap” refers to (S)-3-((tert-butoxycarbonyl)amino)-2-(2,5-dioxo-2,5-dihydro-1H-pyrrol-1-yl)propanoic acid; Beta(β)-MalDap refers to (S)-2-((tert-butoxycarbonyl)amino)-3-(2,5-dioxo-2,5-dihydro-1H-pyrrol-1-yl)propanoic acid; “MeOH” refers to methanol; “Min” refers to minute/minutes; “MTT” refers to methylthiazole tetrazolium; “Mtt” refers to 4-methyltrityl; “Oxyma” refers to ethyl cyanohydroxyiminoacetate; “PEG” refers to polyethylene glycol; “PyBOP” refers to benzotriazole-1-yl-oxy-tris-pyrrolidino-phosphonium hexafluorophosphate; “RT” refers to room temperature: “t-Bu” refers to tertiary butyl; “SPPS” refers to solid-phase peptide synthesis; “soln” refers to solution; “TFA” refers to trifluoracetic acid; “TIPS” refers to triisopropylsilane; “TCEP” refers to tris(2-carboxyethyl)phosphine hydrochloride; and “THF” refers to tetrahydrofuran.

[0393] As used herein, “BEA-MalDap₂” refers to the structure:

[chemical structure]

[0394] As used herein, “dCAP” refers to the structure:

[chemical structure]

[0395] As used herein, “BEA-MSTP₂” refers to the structure:

[chemical structure]

[0396] As used herein, “BEA-Acetyl₂” refers to the structure:

[chemical structure]

[0397] As used herein, “BEA-OD₂” refers to the structure:

[chemical structure]

[0398] As used herein, “BEA-β-MalDap2” refers to the structure:

[chemical structure]

[0399] As used herein, “about” means within a statistically meaningful range of a value or values such as, for example, a stated concentration, length, molecular weight, pH, sequence identity, time frame, temperature or volume. Such a value or range can be within an order of magnitude typically within 20%, more typically within 10%, and even more typically within 5% of a given value or range. The allowable variation encompassed by “about” will depend upon the particular system under study, and can be readily appreciated by one of skill in the art.

[0400] As used herein, and in reference to one or more of the GIP, GLP-1 or glucagon receptors, “activity,” “activate,” “activating” and the like means a capacity of a compound, such as the polypeptides described herein, to bind to and induce a response at the receptor(s), as measured using assays known in the art, such as the in vitro assays described below.

[0401] As used herein, “amino acid with a functional group available for conjugation” means any natural (coded) or non-natural (non-coded) amino acid with a functional group that may be conjugated to fatty acid directly or by way of, for example, a linker. Examples of such functional groups include, but are not limited to, alkynyl, alkenyl, amino, azido, bromo, carboxyl, chloro, iodo, and thiol groups. Examples of natural amino acids including such functional groups include K (amino), C (thiol), E (carboxyl) and D (carboxyl).

[0402] As used herein, “conservative amino acid substitution” means substitution of an amino acid with an amino acid having similar characteristics (e.g., charge, side-chain size, hydrophobicity/hydrophilicity, backbone conformation and rigidity, etc.) and having minimal impact on the biological activity of the resulting substituted peptide or polypeptide. Conservative substitutions of functionally similar amino acids are well known in the art and thus need not be exhaustively described herein.

[0403] As used herein, “C₁₆-C₂₂ fatty acid” means a carboxylic acid having between 16 and 22 carbon atoms. The C₁₆-C₂₂ fatty acid suitable for use herein can be a saturated monoacid or a saturated diacid. As used herein, “saturated” means the fatty acid contains no carbon-carbon double or triple bonds. Unless otherwise specified, when referred to herein, a fatty acid may also include other acidic groups, such as a phosphonic acid or a sulfonic acid.

[0404] As used herein, “effective amount” means an amount, concentration or dose of one or more polypeptides described herein, or a pharmaceutically acceptable salt thereof which, upon single or multiple dose administration to an individual in need thereof, provides a desired effect in such an individual under diagnosis or treatment. An effective amount can be readily determined by one of skill in the art through the use of known techniques and by observing results obtained under analogous circumstances. In determining the effective amount for an individual, a number of factors are considered including, but not limited to, the species of mammal; its size, age and general health; the specific disease or disorder involved; the degree of or involvement of or the severity of the disease or disorder; the response of the individual patient; the particular polypeptide administered; the mode of administration; the bioavailability characteristics of the preparation administered; the dose regimen selected; the use of concomitant medication; and other relevant circumstances.

[0405] As used herein, “extended duration of action” means that binding affinity and activity for a polypeptide continues for a period of time greater than native human GIP, GLP-1 and/or glucagon, allowing for dosing at least as infrequently as once daily, thrice-weekly, twice-weekly, once-weekly, bi-weekly (every two weeks) or once monthly. The time action profile of the polypeptide may be measured using known pharmacokinetic test methods such as those utilized in the examples below.

[0406] As used herein, “polypeptide” or “peptide” means a polymer composed of multiple amino acid residues joined covalently in a specific sequence. These amino acids are linked via amide (peptide) bonds, which form when the carboxyl group of one amino acid reacts with the amino group of another, releasing a molecule of water. The term applies to polymers comprising naturally occurring amino acids and polymers comprising one or more non-naturally occurring amino acids.

[0407] As used herein, “individual in need thereof” means a mammal, such as a human, with a condition, disease, disorder or symptom requiring treatment or therapy, including for example, those listed herein.

[0408] As used herein, “treat,” “treating,” “to treat” and the like mean restraining, slowing, stopping or reversing the progression or severity of an existing condition, disease, disorder or symptom.

[0409] As used herein, and with reference to a compound, “dual agonist activity” means a compound with activity at each of the GIP and GLP-1 receptors, especially a polypeptide having sufficient activity at each receptor to provide the benefits of agonism of that receptor while avoiding unwanted side effects associated with too much activity. The polypeptides having dual agonist activity have extended duration of action at the GIP and GLP-1 receptors, which advantageously allows for dosing as infrequently as once-a-week, twice-monthly, once-monthly or once-quarterly.

[0410] As used herein, and with reference to a compound, “triple agonist activity” means a compound with activity at each of the GIP, GLP-1 and glucagon receptors, especially a polypeptide having sufficient activity at each receptor to provide the benefits of agonism of that receptor while avoiding unwanted side effects associated with too much activity. The polypeptides having triple agonist activity have extended duration of action at the GIP, GLP-1 and glucagon receptors, which advantageously allows for dosing as infrequently as once-a-week, twice-monthly, once-monthly or once-quarterly.

[0411] As used herein, the term “Sequence identity” refers to the degree of similarity between two sequences. The degree of sequence identity between two polypeptides may be expressed as a percent, calculated as follows: % Sequence identity=100%*(number of identical amino acids)/(length of the shortest common sequence).

[0412] In certain embodiments of polypeptides of any of the formulas described herein, the polypeptide is an isotopic derivative of any one of the polypeptides described herein or a pharmaceutically acceptable salt thereof. It is understood that the isotopic derivative can be prepared using any of a variety of art-recognized techniques. For example, the isotopic derivatives can generally be prepared by carrying out the procedures disclosed in the examples described herein by substituting an isotopically labeled reagent for a non-isotopically labeled reagent. In an embodiment of a polypeptide of any of the formulas described herein, or a pharmaceutically acceptable salt thereof, the polypeptide is a deuterated derivative of any one of the polypeptides described herein.

[0413] In the polypeptides of this invention any atom not specifically designated as a particular isotope is meant to represent any stable isotope of that atom. Unless otherwise stated, when an atom is designated specifically as “H” or “hydrogen”, the atom is understood to have hydrogen at its natural abundance isotopic composition. Also, unless otherwise stated, when an atom is designated specifically as “D” or “deuterium”, the atom is understood to have deuterium at an abundance substantially greater than the natural abundance of deuterium, which is 0.015%.

[0414] The polypeptides described herein may react with any number of inorganic and organic acids/bases to form pharmaceutically acceptable acid/base addition salts. Pharmaceutically acceptable salts and common techniques for preparing them are well known in the art (see, e.g., Stahl et al., Handbook of Pharmaceutical Salts: Properties. Selection and Use, 2^{nd} Revised Edition (Wiley-VCH, 2011)). Pharmaceutically acceptable salts for use herein include sodium, potassium, trifluoroacetate, hydrochloride and/or acetate salts. Thus, in some embodiments, provided herein are pharmaceutically acceptable salt forms of polypeptides. In some embodiments, the pharmaceutically acceptable forms are selected from sodium or potassium salts. In some embodiments, the pharmaceutically acceptable forms are selected from the group consisting of sodium, potassium salts. In some embodiments, a pharmaceutically acceptable salt is a sodium salt.

[0415] In another embodiment, provided herein is a pharmaceutical composition comprising a polypeptide described herein, or a pharmaceutically acceptable salt thereof, and a pharmaceutically acceptable carrier, diluent, or excipient. Some pharmaceutical compositions and techniques for preparing the same are well known in the art. See, e.g., Remington: The Science and Practice of Pharmacy (Troy, Ed., 21^{st} Edition, Lippincott, Williams & Wilkins, 2006).

[0416] In some embodiments, the pharmaceutical composition is suitable for administration by a parenteral route (e.g., subcutaneous, intravenous, intraperitoneal, intramuscular or transdermal). In some embodiments, the pharmaceutical composition is suitable for oral administration (e.g., tablet, capsule). In some embodiments, the pharmaceutical composition is administered parenterally. In some embodiments, the pharmaceutical composition is administered orally.

[0417] The disclosure also provides and therefore encompasses novel intermediates and methods of synthesizing the polypeptides described herein, or pharmaceutically acceptable salts thereof. The intermediates and polypeptides described herein can be prepared by a variety of techniques known in the art. For example, a method using chemical synthesis is illustrated in the Examples below or using biological expression. The specific synthetic steps for each of the routes described may be combined in different ways to prepare the polypeptides described herein. The reagents and starting materials are readily available to one of skill in the art.

[0418] With respect to chemical synthesis, one can use standard manual or automated solid-phase synthesis procedures. For example, automated peptide synthesizers are commercially available from, for example, CEM (Charlotte, North Carolina), CSBio (Menlo Park, California) and Gyros Protein Technologies Inc. (Tucson, AZ). Reagents for solid-phase synthesis are readily available from commercial sources. Solid-phase synthesizers can be used according to the manufacturer's instructions for blocking interfering groups, protecting amino acids during reaction, coupling, deprotecting and capping of unreacted amino acids.

[0419] The compounds disclosed herein include all possible stereoisomers, geometric isomers (e.g., cis/trans), and structural isomers unless specifically stated otherwise. Such isomers may exist due to chiral centers, double bonds, or other stereogenic elements within the molecular structure. Unless otherwise indicated, the nomenclature used and the structures represented are intended to encompass racemic mixtures, individual enantiomers, diastereomers, positional isomers, and regioisomers, as well as mixtures thereof. The invention extends to any pharmaceutically acceptable form of these compounds, including salts, solvates, and polymorphs, regardless of their isomeric composition.

[0420] With respect to biological expression, one can use standard recombinant techniques to construct a polynucleotide having a nucleic acid sequence that encodes an amino acid sequence for all or part of a polypeptide, incorporate that polynucleotide into recombinant expression vectors, and introduce the vectors into host cells, such as bacteria, yeast and mammalian cells, to produce the polypeptide. See, e.g., Green & Sambrook, “Molecular Cloning: A Laboratory Manual” (Cold Spring Harbor Laboratory Press, 4th ed. 2012). The polypeptides may readily be produced in mammalian cells such as CHO, NSO, 20 HEK293, BHK, or COS cells; in bacterial cells such as E. coli, Bacillus subtilis, or Pseudomonas fluorescens; in insect cells, or in fungal or yeast cells, which are cultured using techniques known in the art. The vectors containing the polynucleotide sequences of interest can be transferred into the host cell by well-known methods, which vary depending on the type of cellular host. Various methods of protein purification may be employed and such methods are known in the art.

[0421] The compounds described herein may be used for treating a variety of conditions, disorders, diseases or symptoms. In particular, methods are provided for treating obesity in an individual, where such methods include at least a step of administering to an individual in need of such treatment an effective amount of a conjugate described herein, or a pharmaceutically acceptable salt thereof.

[0422] Additionally, methods are provided for chronic weight management in an individual, where such methods include at least a step of administering to an individual in need of such treatment an effective amount of a conjugate described herein, or a pharmaceutically acceptable salt thereof.

[0423] Additionally, methods are provided for treating type 2 diabetes mellitus (T2DM) in an individual, where such methods include at least a step of administering to an individual in need of such treatment an effective amount of a conjugate described herein, or a pharmaceutically acceptable salt thereof.

[0424] Additionally, methods are provided for treating non-alcoholic fatty liver disease (NAFLD) in an individual, where such methods include at least a step of administering to an individual in need of such treatment an effective amount of a conjugate described herein, or a pharmaceutically acceptable salt thereof.

[0425] Additionally, methods are provided for treating non-alcoholic steatohepatitis (NASH) in an individual, where such methods include at least a step of administering to an individual in need of such treatment an effective amount of a conjugate described herein, or a pharmaceutically acceptable salt thereof.

[0426] Additionally, methods are provided for treating dyslipidemia in an individual, where such methods include at least a step of administering to an individual in need of such treatment an effective amount of a polypeptide described herein, or a pharmaceutically acceptable salt thereof.

[0427] Additionally, methods are provided for treating metabolic syndrome in an individual, where such methods include at least a step of administering to an individual in need of such treatment an effective amount of a conjugate described herein, or a pharmaceutically acceptable salt thereof.

[0428] Additionally, methods are provided for treating osteoarthritis (OA) in an individual, where such methods include at least a step of administering to an individual in need of such treatment an effective amount of a conjugate described herein, or a pharmaceutically acceptable salt thereof.

[0429] Additionally, methods are provided for treating obesity-related sleep apnea (OSA) in an individual, where such methods include at least a step of administering to an individual in need of such treatment an effective amount of a conjugate described herein, or a pharmaceutically acceptable salt thereof.

[0430] Additionally, methods are provided for treating polycystic ovary syndrome (PCOS) in an individual, where such methods include at least a step of administering to an individual in need of such treatment an effective amount of a conjugate described herein, or a pharmaceutically acceptable salt thereof.

[0431] Additionally, methods are provided for inducing non-therapeutic weight loss in an individual, where such methods include at least a step of administering to an individual in need of such treatment an effective amount of a compound described herein, or a pharmaceutically acceptable salt thereof.

[0432] In these methods, effectiveness of the compounds can be assessed by, for example, observing a significant reduction in blood glucose, observing a significant increase in insulin, observing a significant reduction in HbA1c and/or observing a significant reduction in body weight.

[0433] Alternatively, the compounds described herein or pharmaceutically acceptable salts thereof may be used for improving bone strength in an individual in need thereof. In some instances, the individual in need thereof has hypo-ostosis or hypo-osteoidosis, or is healing from bone fracture, orthotic procedure, prosthetics implant, dental implant, and/or spinal fusion. The polypeptides described herein also may be used for treating other disorders such as Parkinson's disease or Alzheimer's disease.

[0434] Additionally, provided are compounds described herein, or a pharmaceutically acceptable salt thereof, for use in therapy. In some embodiments, provided herein is a polypeptide described herein or a pharmaceutically acceptable salt thereof, for use in treating obesity, chronic weight management, type 2 diabetes mellitus, non-alcoholic fatty liver disease (NAFLD), non-alcoholic steatohepatitis (NASH), metabolic dysfunction-associated steatohepatitis (MASH), dyslipidemia, metabolic syndrome, osteoarthritis (OA), obesity-related sleep apnea (OSA) and polycystic ovary syndrome (PCOS). Also provided is a use of a polypeptide described herein, or a pharmaceutically acceptable salt thereof, for inducing non-therapeutic weight loss.

[0435] Additionally, provided is a use of the compounds described herein, or a pharmaceutically acceptable salt thereof, in the manufacture of a medicament for treating obesity, chronic weight management, type 2 diabetes mellitus, non-alcoholic fatty liver disease (NAFLD), non-alcoholic steatohepatitis (NASH), dyslipidemia, metabolic syndrome, osteoarthritis (OA), obesity-related sleep apnea (OSA) and polycystic ovary syndrome (PCOS). Also provided is a use of a polypeptide described herein, or a pharmaceutically acceptable salt thereof, in the manufacture of a medicament for inducing non-therapeutic weight loss.

[0436] The polypeptides, compounds, or pharmaceutical compositions described herein may be provided as part of a kit. In some instances, the kit includes a device for administering at least one polypeptide (and optionally at least one additional therapeutic agent) to an individual, such as a syringe, automatic injector or pump. Unless defined otherwise, all technical and scientific terms used herein have the same meaning as commonly understood by one of skill in the art to which the disclosure pertains. Although any methods and materials similar to or equivalent to those described herein can be used in the practice or testing of the polypeptides, pharmaceutical compositions, and methods, the preferred methods and materials are described herein.

[0437] Reference to an element by the indefinite article “a” or “an” does not exclude the possibility that more than one element is present, unless the context clearly requires that there be one and only one element. The indefinite article “a” or “an” thus usually means “at least one.”

[0438] An additional nonlimiting list of embodiments is provided below:

[0439] Embodiment 1. A compound of the formula:

[chemical structure]

or a pharmaceutically acceptable salt thereof, wherein:
[0440] R₁ and R₂ are independently selected from the group consisting of:

[chemical structure]

[0441] R³ and R⁴ independently comprise a C₁ to C₅ alkyl which is optionally substituted with one or more of NH₂, CH₂NH₂, and CH₂CH₂NH₂,
[0442] *is a connection point to a sulfur atom in a cysteine residue in Fc₁ or Fc₂,
[0443] **is the connection point to R₅ or R₆,
[0444] R₅ and R₆ are independently selected from a covalent bond, or C₁ to C₅ alkyl,
[0445] U comprises a tertiary amine or 1,3,5-substituted phenyl,
[0446] Z comprises O, NH, C₁ to C₃₀ alkyl, (OCH₂CH₂)ₘ, an amino acid polymer, or a combination thereof,
[0447] X comprises a therapeutic polypeptide,
[0448] Y comprises a fatty acid,
[0449] m is an integer between 1-30; and
[0450] Fc₁ and Fc₂ each comprise an Fc region.

[0451] Embodiment 2. The compound of embodiment 1, wherein the compound comprises:

[chemical structure]

[0452] or a pharmaceutically acceptable salt thereof.

[0453] Embodiment 3. The compound of embodiment 1, wherein the compound comprises:

[chemical structure]

[0454] or a pharmaceutically acceptable salt thereof.

[0455] Embodiment 4. The compound of embodiment 1, wherein the compound comprises:

[chemical structure]

[0456] or a pharmaceutically acceptable salt thereof.

[0457] Embodiment 5. The compound of embodiment 1, wherein the compound comprises:

[chemical structure]

[0458] or a pharmaceutically acceptable salt thereof.

[0459] Embodiment 6. The compound of any one of embodiments 1-5, wherein the polypeptide comprises:

X₁X₂X₃X₄TX₆TSDX₁₀X₁₁X₁₂X₁₃LX₁₅X₁₆KAQX₂₀X₂₁FIX₂₄X₂₅
LX₂₇X₂₈X₂₉X₃₀X₃₁X₃₂X₃₃X₃₄X₃₅X₃₆X₃₇X₃₈X₃₉X₄₀X₄₁,

[0460] wherein:
[0461] X₁ is H, NMeY, or Y,
[0462] X₂ is Ac4c, Aib, αMeS, Iva, or D-Ala,
[0463] X₃ is Q, E, or H,
[0464] X₄ is G or D-Ala,
[0465] X₆ is αMeF(2F), F, or αMeF,
[0466] X₁₀ is 4-Pal, Y, or V,
[0467] X₁₁ is Aib, S, or αMeS,
[0468] X₁₂ is I or S,
[0469] X₁₃ is L or αMeL,
[0470] X₁₅ is D or E,
[0471] X₁₆ is E or Orn,
[0472] X₂₀ is Aib, αMeL, Iva, or αMe4Pal,
[0473] X₂₁ is E, Q, D, or Orn,
[0474] X₂₄ is K, Q, E, D-Glu, or D-Gln,
[0475] X₂₅ is αMeY or Y
[0476] X₂₇ is I, L, or V,
[0477] X₂₈ K, E or A,
[0478] X₂₉ is Aib, G, or Q,
[0479] X₃₀ is G or S,
[0480] X₃₁ is P, G, E, or Orn,
[0481] X₃₂ is absent, S or P,
[0482] wherein if X₃₂ is S or P, then X₃₃ is S,
[0483] wherein if X₃₃ is S, then is X₃₄ is G or Aib,
[0484] wherein if X₃₄ is G or Aib, then X₃₅ is absent or A or Orn,
[0485] wherein if X₃₅ is A or Orn, then X₃₆ is absent or P,
[0486] wherein if X₃₆ is P, then X₃₇ is absent or P,
[0487] wherein if X₃₇ is P, then X₃₈ is absent or P,
[0488] wherein if X₃₈ is P, then X₃₉ is absent or S, Orn, or G
[0489] wherein if X₃₉ is S, Orn, or G, then X₄₀ is absent, K, or G,
[0490] wherein if X₄₀ is K or G, then X₄₁ is absent or S or G,
[0491] wherein if X₃₂ is absent, then X₃₃ through X₄₁ are also absent,
[0492] wherein if X₃₅ is absent, then X₃₆ through X₄₁ are also absent,
[0493] wherein if X₃₆ is absent, then X₃₇ through X₄₁ are also absent,
[0494] wherein if X₃₇ is absent, then X₃₈ through X₄₁ are also absent,
[0495] wherein if X₃₈ is absent, then X₃₉ through X₄₁ are also absent,
[0496] wherein if X₃₉ is absent, then X₄₀ and X₄₁ are also absent,
[0497] wherein if X₄₀ is absent, then X₄₁ is absent, and
[0498] wherein the C-terminal amino acid is optionally amidated, or a pharmaceutically acceptable salt thereof.

[0499] Embodiment 7. The compound of embodiment 6, wherein Z is conjugated to the amino acid at any one of positions 24, 28, 31 or 40 of the polypeptide.

[0500] Embodiment 8. The compound of any one of embodiments 1-7, or a pharmaceutically acceptable salt thereof, wherein Z comprises an amino acid polymer.

[0501] Embodiment 9. The compound of embodiment 8, or a pharmaceutically acceptable salt thereof, wherein the amino acid polymer comprises any of: (GGGGS)n, (SGGGG)n, (GGGGQ)n, (EAAAK)n, (KAAAE)n, (AEEA)n, G(PA)n, G(PA)n, G(PE)n, G(PK)n, (AP)n, (AP)n, or G(EP)n, wherein n is an integer between 1-10.

[0502] Embodiment 10. The compound of any of embodiments 1-9, or a pharmaceutically acceptable salt thereof, wherein the lysine at position 17 is conjugated to a C₁₆-C₂₂ fatty acid via a linker between the amino acid and the C₁₆-C₂₂ fatty acid.

[0503] Embodiment 11. The compound of embodiment 10, or pharmaceutically acceptable salt thereof, wherein the C₁₆-C₂₂ fatty acid is conjugated to the lysine at position 17 via a linker.

[0504] Embodiment 12. The compound of embodiment 11, or a pharmaceutically acceptable salt thereof, wherein the linker comprises one to four amino acids.

[0505] Embodiment 13. The compound of embodiment 12, or a pharmaceutically acceptable salt thereof, wherein the amino acids comprised in the linker are Glu, γGlu or a combination thereof.

[0506] Embodiment 14. The compound of any of embodiments 11-13, or a pharmaceutically acceptable salt thereof, wherein the linker comprises one to four (2-[2-(2-amino-ethoxy)-ethoxy]-acetyl) moieties.

[0507] Embodiment 15. The compound of embodiment 14, or a pharmaceutically acceptable salt thereof, wherein the linker comprises a structure of (γGlu)ₐ-(2-[2-(2-amino-ethoxy)-ethoxy]-acetyl)_{b}-(γGlu)_{c}-CO—(CH₂)ₚ—CO₂H, wherein ₐ is 0 or 1, _{b} is 0, 1 or 2, _{c} is 1, 2 or 3, and ₚ is an integer between 14 to 20.

[0508] Embodiment 16. The compound of embodiment 15, or a pharmaceutically acceptable salt thereof, wherein a is 0, b is 1 and c is 1.

[0509] Embodiment 17. The compound of any one of embodiments 1-16, or a pharmaceutically acceptable salt thereof, wherein the polypeptide comprises a sequence identity of more than 90% to any of SEQ ID NO: 1-SEQ ID NO:482.

[0510] Embodiment 18. The compound of embodiment 17, or a pharmaceutically acceptable salt thereof, wherein the polypeptide comprises a sequence of any of SEQ ID NO:1-SEQ ID NO:482.

[0511] Embodiment 19. The compound of any one of embodiments 1-18, or a pharmaceutically acceptable salt thereof, wherein the Fc1 and Fc2 are selected from the group consisting of:

| (SEQ ID NO: 935) | |
|---|---|
| a. | AGCPAPEAAGGPSVFLFPPKPKDTLMISRTPEVTCVVVDVSQEDPEVQFN |
| | WYVDGVEVHNAKTKPREEQFNSTYRVVSVLTVLHQDWLNGKEYKCKVS |
| | NKGLPSSIEKTISKAKGQPREPQVYTLPPSQEEMTKNQVSLTCLVKGFYPS |
| | DIAVEWESNGQPENNYKTTPPVLDSDGSFFLYSRLTVDKSRWQEGNVFSC |
| | SVMHEALHNHYTQKSLSLSLG, |
| (SEQ ID NO: 936) | |
| b. | AGCPAPEAAGGPSVFLFPPKPKDTLMISRTPEVTCVVVDVSQEDPEVKFN |
| | WYVDGVEVHNAKTKPREEQFNSTYRVVSVLIVLHQDWLNGKEYKCKVS |
| | NKGLPSSIEKTISKAKGQPREPQVYTLPPSREEMTKNQVSLTCLVKGFYPS |
| | DIAVEWESNGQPENNYKTTPPVLDSDGSFFLYSRLTVDKSRWQQGNVFSC |
| | SVMHEALHNHYTQKSLSLSLG, |
| (SEQ ID NO: 941) | |
| c. | IGCPAPEAAGGPSVFLFPPKPKDTLMISRTPEVTCVVVDVSQEDPEVKFNW |
| | YVDGVEVHNAKTKPREEQFNSTYRVVSVLTVLHQDWLNGKEYKCKVSN |
| | KGLPSSIEKTISKAKGQPREPQVYTLPPSREEMTKNQVSLTCLVKGFYPSDI |
| | AVEWESNGQPENNYKTTPPVLDSDGSFFLYSRLTVDKSRWQQGNVFSCSV |
| | MHEALHNHYTQKSLSLSLG, |
| (SEQ ID NO: 941) | |
| d. | IGCPAPEAAGGPSVFLFPPKPKDTLMISRTPEVTCVVVDVSQEDPEVKFNW |
| | YVDGVEVHNAKTKPREEQFNSTYRVVSVLTVLHQDWLNGKEYKCKVSN |
| | KGLPSSIEKTISKAKGQPREPQVYTLPPSREEMTKNQVSLTCLVKGFYPSDI |
| | AVEWESNGQPENNYKTTPPVLDSDGSFFLYSRLTVDKSRWQQGNVFSCSV |
| | MHEALHNHYTQKSLSLSLG, |
| (SEQ ID NO: 943) | |
| e. | AGCPAPEAAGGPSVFLFPPKPKDTLMISRTPEVTCVVVDVSHEDPEVKFN |
| | WYVDGVEVHNAKTKPREEQYNSTYRVVSVLTVLHQDWLNGKEYKCKVS |
| | NKALAAPIEKTISKAKGQPREPQVYTLPPSREEMTKNQVSLTCLVKGFYPS |
| | DIAVEWESNGQPENNYKTTPPVLDSDGSFFLYSKLTVDKSRWQQGNVFSC |
| | SVMHEALHNHYTQKSLSLSPGK, |
| (SEQ ID NO: 944) | |
| f. | AGCPAPELLGGPSVFLFPPKPKDTLMISRTPEVTCVVVDVSHEDPEVKFNW |
| | YVDGVEVHNAKTKPREEQYNSTYRVVSVLTVLHQDWLNGKEYKCKVSN |
| | KALPAPIEKTISKAKGQPREPQVYTLPPSREEMTKNQVSLTCLVKGFYPSDI |
| | AVEWESNGQPENNYKTTPPVLDSDGSFFLYSKLTVDKSRWQQGNVFSCSV |
| | MHEALHNHYTQKSLSLSPGK, |
| (SEQ ID NO: 1179) | |
| g. | ESKYGPPCPPCPAPEAAGGPSVFLFPPKPKDTLMISRTPEVTCVVVDVSQE |
| | DPEVKFNWYVDGVEVHNAKTKPREEQFNSTYRVVSVLTVLHQDWLNGK |
| | EYKCKVSNKGLPSSIEKTISKAKGQPREPQVYTLPPSREECTKNQVSLTCL |
| | VKGFYPSDIAVEWESNGQPENNYKTTPPVLDSDGSFFLYSRLTVDKSRWQ |
| | QGNVFSCSVMHEALHNHYTQKSLSLSLG, |
| (SEQ ID NO: 1180) | |
| h. | ESKYGPPCPPCPAPEAAGGPSVFLFPPKPKDTLMISRTPEVTCVVVDVSQE |
| | DPEVKFNWYVDGVEVHNAKTKPREEQFNSTYRVVSVLTVLHQDWLNGK |
| | EYKCKVSNKGLPSSIEKTISKAKGQPREPQVYTLPPSREEMTKNQVSLTCL |
| | VKGFYPSDIAVEWESNGQPENNYKTTPPVCDSDGSFFLYSRLTVDKSRWQ |
| | QGNVFSCSVMHEALHNHYTQKSLSLSLG, |
| (SEQ ID NO: 1181) | |
| i. | ESKYGPPCPPCPAPEAAGGPSVFLFPPKPKDTLMISRTPEVTCVVVDVSQE |
| | DPEVKFNWYVDGVEVHNAKTKPREEQFNSTYRVVSVLTVLHQDWLNGK |
| | EYKCKVSNKGLPSSIEKTISKAKGQPREPQVYTLPPSREEMTKNQVSLTCL |
| | VKGFYPSDIAVEWESNGQPENNYKTTPPVLDSDGSFFLYSRLTVDKCRW |
| | QQGNVFSCSVMHEALHNHYTQKSLSLSLG |
| (SEQ ID NO: 948) | |
| j. | ESKYGPPCPPCPAPEAAGGPSVFLFPPKPKDTLMISRTPEVTCVVVDVSQE |
| | DPEVKFNWYVDGVEVHNAKTKPREEQFNSTYRVVSVLTVLHQDWLNGK |
| | EYKCKVSNKGLPSSIEKTISKAKGQPREPQVYTLPPSREEMTKNQVSLTCL |
| | VKGFYPSDIAVEWESNGQPENNYKTTPPVLDSDGSFLLYSKLTVDKSRWQ |
| | QGNVFSCSVMHEALHNHYTQKSLSLSLG. |

[0512] Embodiment 20. The compound of any one of embodiments 1-19, or a pharmaceutically acceptable salt thereof, wherein the pharmaceutically acceptable salt is selected from sodium, potassium, trifluoroacetate, hydrochloride or acetate.

[0513] Embodiment 21. A compound comprising any of the following Fc-acylated polypeptides:

| Com- | | Fc |
|---|---|---|
| pound | | Region |
| No. | Compound | (SEQ ID) |
| 1 | Y-Aib-EGT-αMeF(2F)-TSD-4Pal-SI-αMeL-LDEK(AEEA2-γGlu-C18_OH)AQ-Aib-EFIe-αMeY- | 935 |
| | LIEGSPSSGAPPPSK[PEG₂₄-BEA-MalDap₂-Fc]-NH₂ | |
| 2 | Y-Aib-EGT-αMeF(2F)-TSD-4Pal-SI-αMeL-LD-Orn-K(AEEA2-γGlu-C18_OH)AQ-Aib-EFIe- | 935 |
| | αMeY-LIEGSPSSGAPPPSK[PEG₂₄-BEA-MalDap₂-Fc]-NH₂ | |
| 3 | Y-Aib-EGT-αMeF(2F)-TSD-4Pal-SI-αMeL-LDEK(AEEA2-γGlu-C18_OH)AQ-Aib-EFIe-αMeY- | 935 |
| | LIEGGGGGGGSGGGGSGGGGSK[BEA-MalDap₂-Fc]-NH₂ | |
| 4 | Y-Aib-EGT-αMeF(2F)-TSD-4Pal-SI-αMeL-LDEK(AEEA2-γGlu-C18_OH)AQ-Aib-EFIe-αMeY- | 935 |
| | LIEGSPSSGAPPPSGGGGSK[BEA-MalDap₂-Fc]-NH₂ | |
| 5 | Y-Aib-EGT-αMeF(2F)-TSD-4Pal-SI-αMeL-LDEK(AEEA2-γGlu-C18_OH)AQ-Aib-EFIe-αMeY- | 935 |
| | LIEGSPSSGAPPPS-AEEA8-K[BEA-MalDap₂-Fc]-NH₂ | |
| 6 | Y-Aib-EGT-αMeF(2F)-TSD-4Pal-SI-αMeL-LDEK(AEEA2-γGlu-C18_OH)AQ-Aib-EFIe-αMeY- | 935 |
| | LIEGSPSSGAPPPS-AEEA4-K[BEA-MalDap₂-Fc]-NH₂ | |
| 7 | Y-Aib-EGT-αMeF(2F)-TSD-4Pal-SI-αMeL-LDEK(AEEA2-γGlu-C18_OH)AQ-Aib-EFIe-αMeY- | 935 |
| | LIEGSPSSGAPPPS-PEG₂₄-K[BEA-MalDap₂-Fc]-NH₂ | |
| 8 | Y-Aib-EGT-αMeF(2F)-TSD-4Pal-SI-αMeL-LDEK(AEEA2-γGlu-C18_OH)AQ-Aib-EFIe-αMeY- | 935 |
| | LIEGSPSSGAPPPSK(AEEA8-BEA-MalDap₂-Fc)-NH₂ | |
| 9 | Y-Aib-EGT-αMeF(2F)-TSD-4Pal-SI-αMeL-LDEK(AEEA2-γGlu-C18_OH)AQ-Aib-EFIe-αMeY- | 935 |
| | LIEGSPSSGAPPPSK(AEEA8-GPAPAPAPAPAPA-BEA-MalDap₂-Fc)-NH₂ | |
| 10 | Y-Aib-EGT-αMeF(2F)-TSD-4Pal-SI-αMeL-LDEK(AEEA2-γGlu-C18_OH)AQ-Aib-EFIe-αMeY- | 935 |
| | LIEGSPSSGAPPPSK(AEEA6-GPAPAPAPAPAPA-BEA-MalDap₂-Fc)-NH₂ | |
| 11 | Y-Aib-EGT-αMeF(2F)-TSD-4Pal-SI-αMeL-LDEK(AEEA2-γGlu-C18_OH)AQ-Aib-EFIe-αMeY- | 935 |
| | LIEGSPSSGAPPPSK(AEEA4-GPAPAPAPAPAPAPAPA-BEA-MalDap₂-Fc)-NH₂ | |
| 12 | Y-Aib-EGT-αMeF(2F)-TSD-4Pal-SI-αMeL-LDEK(AEEA2-γGlu-C18_OH)AQ-Aib-EFIe-αMeY- | 935 |
| | LIEGSPSSGAPPPSK[GPAPAPAPAPAPAPAPA-BEA-MalDap₂-Fc]-NH₂ | |
| 13 | Y-Aib-EGT-αMeF(2F)-TSD-4Pal-SI-αMeL-LDEK(AEEA2-γGlu-C18_OH)AQ-Aib-EFIe-αMeY- | 935 |
| | LIEGSPSSGAPPPSK(AEEA4-GKAAAEKAAAEKAAAE-BEA-MalDap₂-Fc)NH₂ | |
| 14 | Y-Aib-EGT-αMeF(2F)-TSD-4Pal-SI-αMeL-LDEK(AEEA2-γGlu-C18_OH)AQ-Aib-EFIe-αMeY- | 935 |
| | LIEGSPSSGAPPPSK(LEAEAAAKEAAAKEAAAKEAAAKALE-BEA-MalDap₂-Fc)-NH₂ | |
| 15 | Y-Aib-EGT-αMeF(2F)-TSD-4Pal-SI-αMeL-LDEK(AEEA2-γGlu-C18_OH)AQ-Aib-EFIE-αMeY- | 935 |
| | LIEGSPSSGAPPPS-K[PEG₂₄-BEA-MalDap₂-Fc]-NH₂ | |
| 16 | Y-Aib-EGT-αMeF(2F)-TSD-4Pal-Aib-I-αMeL-LDEK(AEEA2-γGlu-C18_OH)AQ-Aib-EFIE-αMeY- | 935 |
| | LIEGSPSSGAPPPS-K[PEG₂₄-BEA-MalDap₂-Fc]-NH₂ | |
| 17 | Y-Aib-EGT-αMeF(2F)-TSD-4Pal-Aib-S-αMeL-LDEK(AEEA2-γGlu-C18_OH)AQ-Aib-EFIE-αMeY- | 935 |
| | LIEGSPSSGAPPPS-K[PEG₂₄-BEA-MalDap₂-Fc]-NH₂ | |
| 18 | Y-Aib-EGT-αMeF(2F)-TSD-4Pal-SI-αMeL-LEEK(AEEA2-γGlu-C18_OH)AQ-Aib-EFIE-αMeY- | 935 |
| | LIEGSPSSGAPPPS-K[PEG₂₄-BEA-MalDap₂-Fc]-NH₂ | |
| 19 | Y-Aib-EGT-αMeF(2F)-TSDV-Aib-I-αMeL-LD-EK(AEEA2-γGlu-C18_OH)AQ-Aib-EFIe-αMeY- | 935 |
| | LIEGSPSSGAPPPS-K[PEG₂₄-BEA-MalDap₂-Fc]-NH₂ | |
| 20 | Y-Aib-EGT-αMeF(2F)-TSDV-Aib-I-αMeL-LD-Orn-K(AEEA2-γGlu-C18_OH)AQ-Aib-EFIe-αMeY- | 935 |
| | LIEGSPSSGAPPPS-K[PEG₂₄-BEA-MalDap₂-Fc]-NH₂ | |
| 21 | Y-Aib-EGT-αMeF(2F)-TSDV-Aib-I-αMeL-LD-Orn-K(AEEA2-γGlu-C18_OH)AQ-Aib-EFIE-αMeY- | 935 |
| | LIEGSPSSGAPPPS-K[PEG₂₄-BEA-MalDap₂-Fc]-NH₂ | |
| 22 | Y-Aib-EGT-αMeF(2F)-TSD-4Pal-SI-αMeL-LDEK(AEEA2-γGlu-C18_OH)AQ-Aib-EFIK[PEG₂₄- | 935 |
| | BEA-MalDap₂-Fc]-αMeY-LIEGSPSSGAPPPSGS-NH₂ | |
| 23 | Y-Aib-EGT-αMeF(2F)-TSD-4Pal-SI-αMeL-LDEK(AEEA2-γGlu-C18_OH)AQ-Aib-EFIe-αMeY- | 935 |
| | LIK[PEG₂₄-BEA-MalDap₂-Fc]GSPSSGAPPPSGS-NH₂ | |
| 24 | Y-Aib-EGT-αMeF(2F)-TSD-4Pal-SI-αMeL-LDEK(AEEA2-γGlu-C18_OH)AQ-Aib-EFIe-αMeY- | 935 |
| | LIEGGGGGGGSGGGGSGGGGSGGGGSK[BEA-MalDap₂-Fc]-NH₂ | |
| 25 | Y-Aib-EGT-αMeF(2F)-TSD-4Pal-SI-αMeL-LDEK(AEEA2-γGlu-C18_OH)AQ-Aib-EFIe-αMeY- | 935 |
| | LIEGGGGGGGSGGGGSGGGGSGGGGSGGGGSK[BEA-MalDap₂-Fc]-NH₂ | |
| 26 | Y-Aib-EGT-αMeF(2F)-TSD-4Pal-SI-αMeL-LDEK(AEEA2-γGlu-C18_OH)AQ-Aib-EFIe-αMeY- | 935 |
| | LIEGGPGGGGSGGGGSGGGGSK[BEA-MalDap₂-Fc]-NH₂ | |
| 27 | Y-Aib-EGT-αMeF(2F)-TSD-4Pal-SI-αMeL-LDEK(AEEA2-γGlu-C18_OH)AQ-Aib-EFIe-αMeY- | 935 |
| | LIEGSPGGGGSGGGGGGGGSK[BEA-MalDap₂-Fc]-NH₂ | |
| 28 | Y-Aib-EGT-αMeF(2F)-TSD-4Pal-SI-αMeL-LDEK(AEEA2-γGlu-C18_OH)AQ-Aib-EFIe-αMeY- | 935 |
| | LIEGGGGGGGSGAPAPAPAPAPAPK[BEA-MalDap₂-Fc]-NH₂ | |
| 29 | Y-Aib-EGT-αMeF(2F)-TSD-4Pal-SI-αMeL-LDEK(AEEA2-γGlu-C18_OH)AQ-Aib-EFIe-αMeY- | 935 |
| | LIEGGGGGGGSGGGGSGAPAPAPAPAPAPK[BEA-MalDap₂-Fc]-NH₂ | |
| 30 | Y-Aib-EGT-αMeF(2F)-TSD-4Pal-SI-αMeL-LDEK(AEEA2-γGlu-C18_OH)AQ-Aib-EFIe-αMeY- | 935 |
| | LIEGGGGGGGSGEAAAKEAAAKEAAAKK[BEA-MalDap₂-Fc]-NH₂ | |
| 31 | Y-Aib-EGT-αMeF(2F)-TSD-4Pal-SI-αMeL-LDEK(AEEA2-γGlu-C18_OH)AQ-Aib-EFIe-αMeY- | 935 |
| | LIEGGGGGGGSGGGGSGEAAAKEAAAKEAAAKK[BEA-MalDap₂-Fc]-NH₂ | |
| 32 | Y-Aib-EGT-αMeF(2F)-TSD-4Pal-SI-αMeL-LD-Orn-K(ϵK2-γGlu-C18_OH)AQ-Aib-EFIe-αMeY- | 935 |
| | LIEGSPSSGAPPPSK[PEG₂₄-BEA-MalDap₂-Fc]-NH₂ | |
| 33 | Y-Aib-EGT-αMeF(2F)-TSD-4Pal-SI-αMeL-LDEK(ϵK2-γGlu-C18_OH)AQ-Aib-EFIe-αMeY- | 935 |
| | LIEGSPSSGAPPPSK[PEG₂₄-BEA-MalDap₂-Fc]-NH₂ | |
| 34 | Y-Aib-EGT-αMeF(2F)-TSD-4Pal-SI-αMeL-LDEK(AEEA2-γGlu-C18_OH)AQ-Aib-EFIe-αMeY- | 935 |
| | LIEGGGGGGGSGAPAPAPAPK[BEA-MalDap₂-Fc]-NH₂ | |
| 35 | Y-Aib-EGT-αMeF(2F)-TSD-4Pal-SI-αMeL-LDEK(AEEA2-γGlu-C18_OH)AQ-Aib-EFIe-αMeY- | 935 |
| | LIEGGGGGGGSGGGGSGGGGSGAPAPAPK[BEA-MalDap₂-Fc]-NH₂ | |
| 36 | Y-Aib-EGT-αMeF(2F)-TSD-4Pal-SI-αMeL-LDEK(AEEA2-γGlu-C18_OH)AQ-Aib-EFIe-αMeY- | 935 |
| | LIEGGGGGGGSGGGGSGGGGSGGGGSGAPAPAPK[BEA-MalDap₂-Fc]-NH₂ | |
| 37 | Y-Aib-EGT-αMeF(2F)-TSD-4Pal-SI-αMeL-LDEK(AEEA2-γGlu-C18_OH)AQ-Aib-EFIe-αMeY- | 935 |
| | LIEGGGGGGGSGGGGSEAAAKEAAAKEAAAKEAAAKK[BEA-MalDap₂-Fc]-NH₂ | |
| 38 | Y-Aib-EGT-αMeF(2F)-TSD-4Pal-SI-αMeL-LDEK(AEEA2-γGlu-C18_OH)AQ-Aib-EFIe-αMeY- | 935 |
| | LIEGGGGGGGSGGGGSGGGGSGEAAAKEAAAKEAAAKK[BEA-MalDap₂-Fc]-NH₂ | |
| 39 | Y-Aib-EGT-αMeF(2F)-TSD-4Pal-SI-αMeL-LDEK(AEEA2-γGlu-C18_OH)AQ-Aib-EFIe-αMeY- | 935 |
| | LIEGGGGGGGSGGGGSGGGGSGGGGSGEAAAKEAAAKEAAAKK[BEA-MalDap₂-Fc]-NH₂ | |
| 40 | Y-Aib-EGT-αMeF(2F)-TSD-4Pal-SI-αMeL-LDEK(AEEA2-γGlu-C18_OH)AQ-Aib-EFIE-αMeY- | 935 |
| | LIEGGGGGGGSGGGGSGGGGSK[BEA-MalDap₂-Fc]-NH₂ | |
| 41 | Y-Aib-EGT-αMeF(2F)-TSD-4Pal-Aib-I-αMeL-LDEK(AEEA2-γGlu-C18_OH)AQ-Aib-EFIE-αMeY- | 935 |
| | LIEGGGGGGGSGGGGSGGGGSK[BEA-MalDap₂-Fc]-NH₂ | |
| 42 | Y-Aib-EGT-αMeF(2F)-TSD-4Pal-SI-αMeL-LEEK(AEEA2-γGlu-C18_OH)AQ-Aib-EFIE-αMeY- | 935 |
| | LIEGGGGGGGSGGGGSGGGGSK[BEA-MalDap₂-Fc]-NH₂ | |
| 43 | Y-Aib-EGT-αMeF(2F)-TSD-V-Aib-I-αMeL-LDEK(AEEA2-γGlu-C18_OH)AQ-Aib-EFIe-αMeY- | 935 |
| | LIEGGGGGGGSGGGGSGGGGSK[BEA-MalDap₂-Fc]-NH₂ | |
| 44 | Y-Aib-EGT-αMeF(2F)-TSD-V-Aib-I-αMeL-LD-Orn-K(AEEA2-γGlu-C18_OH)AQ-Aib-EFIe-αMeY- | 935 |
| | LIEGGGGGGGSGGGGSGGGGSK[BEA-MalDap₂-Fc]-NH₂ | |
| 45 | Y-Aib-EGT-αMeF(2F)-TSD-V-Aib-I-αMeL-LD-Orn-K(AEEA2-γGlu-C18_OH)AQ-Aib-EFIE-αMeY- | 935 |
| | LIEGGGGGGGSGGGGSGGGGSK[BEA-MalDap₂-Fc]-NH₂ | |
| 46 | Y-Aib-EGT-αMeF(2F)-TSD-4Pal-SI-αMeL-LD-Orn-K(AEEA2-γGlu-C18_OH)AQ-Aib-EFIE-αMeY- | 935 |
| | LIEGGGGGGGSGGGGSGGGGSK[BEA-MalDap₂-Fc]-NH₂ | |
| 47 | Y-Aib-EGT-αMeF(2F)-TSD-4Pal-Aib-I-αMeL-LD-Orn-K(AEEA2-γGlu-C18_OH)AQ-Aib-EFIE- | 935 |
| | αMeY-LIEGGGGGGGSGGGGSGGGGSK[BEA-MalDap₂-Fc]-NH₂ | |
| 48 | Y-Aib-EGT-αMeF(2F)-TSD-4Pal-SI-αMeL-LE-Orn-K(AEEA2-γGlu-C18_OH)AQ-Aib-EFIE-αMeY- | 935 |
| | LIEGGGGGGGSGGGGSGGGGSK[BEA-MalDap₂-Fc]-NH₂ | |
| 49 | Y-Aib-EGT-αMeF(2F)-TSD-4Pal-SI-αMeL-LDEK(AEEA2-γGlu-C18_OH)AQ-Aib-EFIe-αMeY- | 935 |
| | LIEGGGGGGGSGGGGSGAPAPAPAPAPAPAPAPK[BEA-MalDap₂-Fc]-NH₂ | |
| 50 | Y-Aib-EGT-αMeF(2F)-TSD-4Pal-SI-αMeL-LDEK(AEEA2-γGlu-C18_OH)AQ-Aib-EFIe-αMeY- | 935 |
| | LIEGGGGGGGSGGGGSGGGGSGAPAPAPAPAPAPK[BEA-MalDap₂-Fc]-NH₂ | |
| 51 | Y-Aib-EGT-αMeF(2F)-TSD-4Pal-SI-αMeL-LDEK(AEEA2-γGlu-C18_OH)AQ-Aib-EFIe-αMeY- | 935 |
| | LIEGGGGGGGSGGGGSGGGGSGGGGSGAPAPAPAPAPAPK[BEA-MalDap₂-Fc]-NH₂ | |
| 52 | Y-Aib-EGT-αMeF(2F)-TSD-4Pal-SI-αMeL-LDEK(AEEA2-γGlu-C18_OH)AQ-Aib-EFIE-αMeY- | 935 |
| | LIEGGGGGGGQGGGGQGGGGQK[BEA-MalDap₂-Fc]-NH₂ | |
| 53 | Y-Aib-EGT-αMeF(2F)-TSD-4Pal-SI-αMeL-LDEK(AEEA2-γGlu-C18-OH)AQ-Aib-EFIE-αMeY- | 935 |
| | LIEGGGGGGGQGGGGQGGGGQGGGGQK[BEA-MalDap₂-Fc]-NH₂ | |
| 54 | Y-Aib-EGT-αMeF(2F)-TSD-4Pal-SI-αMeL-LDEK(AEEA2-γGlu-C18_OH)AQ-Aib-EFIE-αMeY- | 935 |
| | LIEGGGGGGGQGGGGQGGGGQGGGGQGGGGQK[BEA-MalDap₂-Fc]-NH₂ | |
| 55 | Y-Aib-EGT-αMeF(2F)-TSD-4Pal-SI-αMeL-LDEK(AEEA2-γGlu-C18_OH)AQ-Aib-EFIK(AEEA8- | 935 |
| | BEA-MalDap₂-Fc)-αMeY-LIEGSPSSGAPPPSGS-NH₂ | |
| 56 | Y-Aib-EGT-αMeF(2F)-TSD-4Pal-SI-αMeL-LDEK(AEEA2-γGlu-C18_OH)AQ-Aib-EFIE-αMeY- | 935 |
| | LIK(AEEA8-BEA-MalDap₂-Fc)GSPSSGAPPPSGS-NH₂ | |
| 57 | Y-Aib-EGT-αMeF(2F)-TSD-4Pal-SI-αMeL-LDEK(AEEA2-γGlu-C18_OH)AQ-Aib-EFIE-αMeY- | 935 |
| | LIK(GGGGSGGGGSGGGGSGGGGSG-BEA-MalDap₂-Fc)GSPSSGAPPPSGS-NH₂ | |
| 58 | Y-Aib-EGT-αMeF(2F)-TSD-4Pal-SI-αMeL-LDEK(AEEA2-γGlu-C18_OH)AQ-Aib-EFIE-αMeY- | 935 |
| | LIEGGGGGGGSGAPAPAPAPAPAPK[BEA-MalDap₂-Fc]-NH₂ | |
| 59 | Y-Aib-EGT-αMeF(2F)-TSD-4Pal-SI-αMeL-LDEK(AEEA2-γGlu-C18_OH)AQ-Aib-EFIE-αMeY- | 935 |
| | LIEGGGGGGGSGGGGSGGGGSGAPAPAPAPAPAPK[BEA-MalDap₂-Fc]-NH₂ | |
| 60 | Y-Aib-EGT-αMeF(2F)-TSD-4Pal-SI-αMeL-LDEK(AEEA2-γGlu-C18_OH)AQ-Aib-EFIE-αMeY- | 935 |
| | LIEGGGGGGGSGEAAAKEAAAKEAAAKK[BEA-MalDap₂-Fc]-NH₂ | |
| 61 | Y-Aib-EGT-αMeF(2F)-TSD-4Pal-SI-αMeL-LDEK(AEEA2-γGlu-C18_OH)AQ-Aib-EFIE-αMeY- | 935 |
| | LIEGGGGGGGSGGGGSGGGGSGEAAAKEAAAKEAAAKK[BEA-MalDap₂-Fc]-NH₂ | |
| 62 | Y-Aib-EGT-αMeF(2F)-TSD-4Pal-Aib-I-αMeL-LDEK(AEEA2-γGlu-C18_OH)AQ-Aib-EFIE-αMeY- | 935 |
| | LIEGGGGGGGSGAPAPAPAPAPAPK[BEA-MalDap₂-Fc]-NH₂ | |
| 63 | Y-Aib-EGT-αMeF(2F)-TSD-4Pal-Aib-I-αMeL-LDEK(AEEA2-γGlu-C18_OH)AQ-Aib-EFIE-αMeY- | 935 |
| | LIEGGGGGGGSGGGGSGGGGSGAPAPAPAPAPAPK[BEA-MalDap₂-Fc]-NH₂ | |
| 64 | Y-Aib-EGT-αMeF(2F)-TSD-4Pal-Aib-I-αMeL-LDEK(AEEA2-γGlu-C18_OH)AQ-Aib-EFIE-αMeY- | 935 |
| | LIEGGGGGGGSGEAAAKEAAAKEAAAKK[BEA-MalDap₂-Fc]-NH₂ | |
| 65 | Y-Aib-EGT-αMeF(2F)-TSD-4Pal-Aib-I-αMeL-LDEK(AEEA2-γGlu-C18_OH)AQ-Aib-EFIE-αMeY- | 935 |
| | LIEGGGGGGGSGGGGSGGGGSGEAAAKEAAAKEAAAKK[BEA-MalDap₂-Fc]-NH₂ | |
| 66 | Y-Aib-EGT-αMeF(2F)-TSD-4Pal-SI-αMeL-LEEK(AEEA2-γGlu-C18_OH)AQ-Aib-EFIE-αMeY- | 935 |
| | LIEGGGGGGGSGAPAPAPAPAPAPK[BEA-MalDap₂-Fc]-NH₂ | |
| 67 | Y-Aib-EGT-αMeF(2F)-TSD-4Pal-SI-αMeL-LEEK(AEEA2-γGlu-C18_OH)AQ-Aib-EFIE-αMeY- | 935 |
| | LIEGGGGGGGSGGGGSGGGGSGAPAPAPAPAPAPK[BEA-MalDap₂-Fc]-NH₂ | |
| 68 | Y-Aib-EGT-αMeF(2F)-TSD-4Pal-SI-αMeL-LEEK(AEEA2-γGlu-C18_OH)AQ-Aib-EFIE-αMeY- | 935 |
| | LIEGGGGGGGSGEAAAKEAAAKEAAAKK[BEA-MalDap₂-Fc]-NH₂ | |
| 69 | Y-Aib-EGT-αMeF(2F)-TSD-4Pal-SI-αMeL-LEEK(AEEA2-γGlu-C18_OH)AQ-Aib-EFIE-αMeY- | 935 |
| | LIEGGGGGGGSGGGGSGGGGSGEAAAKEAAAKEAAAKK[BEA-MalDap₂-Fc]-NH₂ | |
| 70 | Y-Aib-EGT-αMeF(2F)-TSD-4Pal-SI-αMeL-LE-Orn-K(AEEA2-γGlu-C18_OH)AQ-Aib-EFIE-αMeY- | 935 |
| | LIEGGGGGGGSGAPAPAPAPAPAPK[BEA-MalDap₂-Fc]-NH₂ | |
| 71 | Y-Aib-EGT-αMeF(2F)-TSD-4Pal-SI-αMeL-LE-Orn-K(AEEA2-γGlu-C18_OH)AQ-Aib-EFIE-αMeY- | 935 |
| | LIEGGGGGGGSGGGGSGGGGSGAPAPAPAPAPAPK[BEA-MalDap₂-Fc]-NH₂ | |
| 72 | Y-Aib-EGT-αMeF(2F)-TSD-4Pal-SI-αMeL-LE-Orn-K(AEEA2-γGlu-C18_OH)AQ-Aib-EFIE-αMeY- | 935 |
| | LIEGGGGGGGSGEAAAKEAAAKEAAAKK[BEA-MalDap₂-Fc]-NH₂ | |
| 73 | Y-Aib-EGT-αMeF(2F)-TSD-4Pal-SI-αMeL-LDEK(AEEA2-γGlu-C18_OH)AQ-Aib-EFIe-αMeY- | 935 |
| | LIEGGGAPAPAPAPAPAPGGGGSGGGGSK[BEA-MalDap₂-Fc]-NH₂ | |
| 74 | Y-Aib-EGT-αMeF(2F)-TSD-4Pal-SI-αMeL-LDEK(AEEA2-γGlu-C18_OH)AQ-Aib- | 935 |
| | EFIK(SGGGGSGGGGSGGGGGPAPAPAPAPAPAG-BEA-MalDap₂-Fc)-αMeY-LIEGSPSSGAPPPSGS- | |
| | NH₂ | |
| 75 | Y-Aib-EGT-αMeF(2F)-TSD-4Pal-SI-αMeL-LDEK(AEEA2-γGlu-C18_OH)AQ-Aib- | 935 |
| | EFIK(SGGGGSGGGGSGGGGGKAAAEKAAAEKAAAEG-BEA-MalDap₂-Fc)-αMeY- | |
| | LIEGSPSSGAPPPSGS-NH₂ | |
| 76 | Y-Aib-EGT-αMeF(2F)-TSD-4Pal-SI-αMeL-LDEK(AEEA2-γGlu-C18_OH)AQ-Aib-EFIE-αMeY- | 935 |
| | LIK(SGGGGSGGGGSGGGGGPAPAPAPAPAPAG-BEA-MalDap₂-Fc)GSPSSGAPPPSGS-NH₂ | |
| 77 | Y-Aib-EGT-αMeF(2F)-TSD-4Pal-SI-αMeL-LDEK(AEEA2-γGlu-C18_OH)AQ-Aib-EFIE-αMeY- | 935 |
| | LIK(SGGGGSGGGGSGGGGGKAAAEKAAAEKAAAEG-BEA-MalDap₂-Fc)GSPSSGAPPPSGS-NH₂ | |
| 78 | Y-Aib-EGT-αMeF(2F)-TSD-4Pal-SI-αMeL-LDEK(AEEA2-γGlu-C18_OH)AQ-Aib-EFIe-αMeY- | 935 |
| | LIEGSPSSGAPPPSK(AEEA4-GPKPKPKPKPKPK-BEA-MalDap₂-Fc)-NH₂ | |
| 79 | Y-Aib-EGT-αMeF(2F)-TSD-4Pal-SI-αMeL-LDEK(AEEA2-γGlu-C18_OH)AQ-Aib-EFIe-αMeY- | 935 |
| | LIEGSPSSGAPPPSK(AEEA4-GPEPEPEPEPEPE-BEA-MalDap₂-Fc)-NH₂ | |
| 80 | Y-Aib-EGT-αMeF(2F)-TSD-4Pal-SI-αMeL-LEEK(AEEA2-γGlu-C18_OH)AQ-Aib-EFIE-αMeY- | 935 |
| | LIEGGGGGGGSGEPEPEPEPEPEPK[BEA-MalDap₂-Fc]-NH₂ | |
| 81 | Y-Aib-EGT-αMeF(2F)-TSD-4Pal-SI-αMeL-LEEK(AEEA2-γGlu-C18_OH)AQ-Aib-EFIE-αMeY- | 935 |
| | LIEGGGGGGGSGGGGSGGGGSGEPEPEPEPEPEPK[BEA-MalDap₂-Fc]-NH₂ | |
| 82 | Y-Aib-EGT-αMeF(2F)-TSD-4Pal-SI-αMeL-LEEK(AEEA2-γGlu-C18_OH)AQ-Aib-EFIE-αMeY- | 935 |
| | LIEGGGGGGGQGGGGQGGGGQGEPEPEPEPEPEPK[BEA-MalDap₂-Fc]-NH₂ | |
| 83 | Y-Aib-EGT-αMeF(2F)-TSD-4Pal-SI-αMeL-LE-Orn-K(AEEA2-γGlu-C18_OH)AQ-Aib-EFIE-αMeY- | 935 |
| | LIEGGGGGGGSGEPEPEPEPEPEPK[BEA-MalDap₂-Fc]-NH₂ | |
| 84 | Y-Aib-EGT-αMeF(2F)-TSD-4Pal-SI-αMeL-LE-Orn-K(AEEA2-γGlu-C18_OH)AQ-Aib-EFIE-αMeY- | 935 |
| | LIEGGGGGGGSGGGGSGGGGSGEPEPEPEPEPEPK(BEA-MalDap₂-Fc)-NH₂ | |
| 85 | Y-Aib-EGT-αMeF(2F)-TSD-4Pal-SI-αMeL-LE-Orn-K(AEEA2-γGlu-C18_OH)AQ-Aib-EFIE-αMeY- | 935 |
| | LIEGGGGGGGQGGGGQGGGGQGEPEPEPEPEPEPK[BEA-MalDap₂-Fc]-NH₂ | |
| 86 | Y-Aib-EGT-αMeF(2F)-TSD-4Pal-SI-αMeL-LEEK(AEEA2-γGlu-C18_OH)AQ-Aib-EFIE-αMeY- | 935 |
| | LIEGSPSSGAPPPS-AEEA2-GEPEPEPEPEPEPK[BEA-MalDap₂-Fc]-NH₂ | |
| 87 | Y-Aib-EGT-αMeF(2F)-TSD-4Pal-SI-αMeL-LEEK(AEEA2-γGlu-C18_OH)AQ-Aib-EFIE-αMeY- | 935 |
| | LIEGSPSSGAPPPS-AEEA4-GEPEPEPEPEPEPK[BEA-MalDap₂-Fc]-NH₂ | |
| 88 | Y-Aib-EGT-αMeF(2F)-TSD-4Pal-SI-αMeL-LE-Orn-K(AEEA2-γGlu-C18_OH)AQ-Aib-EFIE-αMeY- | 935 |
| | LIEGSPSSGAPPPS-AEEA2-GEPEPEPEPEPEPK[BEA-MalDap₂-Fc]-NH₂ | |
| 89 | Y-Aib-EGT-αMeF(2F)-TSD-4Pal-SI-αMeL-LE-Orn-K(AEEA2-γGlu-C18_OH)AQ-Aib-EFIE-αMeY- | 935 |
| | LIEGSPSSGAPPPS-AEEA4-GEPEPEPEPEPEPK[BEA-MalDap₂-Fc]-NH₂ | |
| 90 | Y-Aib-EGT-αMeF(2F)-TSD-4Pal-SI-αMeL-LEEK(AEEA2-γGlu-C18_OH)AQ-Aib-EFIE-αMeY- | 935 |
| | LIEGSPSSGAPPPSK(AEEA6-GPAPAPAPAPAPA-BEA-MalDap₂-Fc)-NH₂ | |
| 91 | Y-Aib-EGT-αMeF(2F)-TSD-4Pal-SI-αMeL-LEEK(AEEA2-γGlu-C18_OH)AQ-Aib-EFIE-αMeY- | 935 |
| | LIEGSPSSGAPPPSK(AEEA4-GPEPEPEPEPEPE-BEA(MalDap₂-Fc)-NH₂ | |
| 92 | Y-Aib-EGT-αMeF(2F)-TSD-4Pal-SI-αMeL-LEEK(AEEA2-γGlu-C18_OH)AQ-Aib-EFIE-αMeY- | 935 |
| | LIEGSPSSGAPPPSK(AEEA4-GPEPEPEPEPEPEPEPE-BEA(MalDap₂-Fc)-NH₂ | |
| 93 | Y-Aib-EGT-αMeF(2F)-TSD-4Pal-SI-αMeL-LE-Orn-K(AEEA2-γGlu-C18_OH)AQ-Aib-EFIE-αMeY- | 935 |
| | LIEGSPSSGAPPPSK(AEEA6-GPAPAPAPAPAPA-BEA(MalDap₂-Fc)-NH₂ | |
| 94 | Y-Aib-EGT-αMeF(2F)-TSD-4Pal-SI-αMeL-LE-Orn-K(AEEA2-γGlu-C18_OH)AQ-Aib-EFIE-αMeY- | 935 |
| | LIEGSPSSGAPPPSK(AEEA4-GPEPEPEPEPEPE-BEA(MalDap₂-Fc)-NH₂ | |
| 95 | Y-Aib-EGT-αMeF(2F)-TSD-4Pal-SI-αMeL-LE-Orn-K(AEEA2-γGlu-C18_OH)AQ-Aib-EFIE-αMeY- | 935 |
| | LIEGSPSSGAPPPSK(AEEA4-GPEPEPEPEPEPEPEPE-BEA(MalDap₂-Fc)-NH₂ | |
| 96 | Y-Aib-EGT-αMeF(2F)-TSD-4Pal-SI-αMeL-LD-Orn-K(AEEA2-γGlu-C18_OH)AQ-Aib-EFIE-αMeY- | 935 |
| | LIEGGGGGGGGGGGGSGAPAPAPAPAPAPK[BEA-MalDap₂-Fc]-NH₂ | |
| 97 | Y-Aib-EGT-αMeF(2F)-TSD-4Pal-Aib-I-αMeL-LD-Orn-K(AEEA2-γGlu-C18_OH)AQ-Aib-EFIE- | 935 |
| | αMeY-LIEGGGGGGGSGGGGSGAPAPAPAPAPAPK[BEA-MalDap₂-Fc]-NH₂ | |
| 98 | Y-Aib-EGT-αMeF(2F)-TSD-4Pal-SI-αMeL-LE-Orn-K(AEEA2-γGlu-C18_OH)AQ-Aib-EFIE-αMeY- | 935 |
| | LIEGGGGGGGSGGGGSGAPAPAPAPAPAPK[BEA-MalDap₂-Fc]-NH₂ | |
| 99 | Y-Aib-EGT-αMeF(2F)-TSD-4Pal-Aib-I-αMeL-LE-Orn-K(AEEA2-γGlu-C18_OH)AQ-Aib-EFIE- | 935 |
| | αMeY-LIEGGGGGGGSGGGGSGAPAPAPAPAPAPK[BEA-MalDap₂-Fc]-NH₂ | |
| 100 | Y-Aib-EGT-αMeF(2F)-TSD-4Pal-Aib-I-αMeL-LD-Orn-K(AEEA2-γGlu-C18_OH)AQ-Aib-EFIe- | 935 |
| | αMeY-LIEGGGGGGGSGGGGSGAPAPAPAPAPAPK[BEA-MalDap₂-Fc]-NH₂ | |
| 101 | Y-Aib-EGT-αMeF(2F)-TSD-4Pal-SI-αMeL-LD-Orn-K(AEEA2-γGlu-C18_OH)AQ-Aib- | 935 |
| | EFIK(GGGGSGGGGSGAPAPAPAPAPAPG-BEA-MalDap₂-Fc)-αMeY-LIEGSPSSGAPPPSGS-NH₂ | |
| 102 | Y-Aib-EGT-αMeF(2F)-TSD-4Pal-Aib-I-αMeL-LD-Orn-K(AEEA2-γGlu-C18_OH)AQ-Aib- | 935 |
| | EFIK(GGGGSGGGGSGAPAPAPAPAPAPG-BEA-MalDap₂-Fc)-αMeY-LIEGSPSSGAPPPSGS-NH₂ | |
| 103 | Y-Aib-EGT-αMeF(2F)-TSD-4Pal-Aib-I-αMeL-LD-Orn-K(ϵK2-γGlu-C18_OH)AQ-Aib-EFIE- | 935 |
| | αMeY-LIEGGPSSGAPPPSGK[PEG₂₄-BEA-MalDap₂-Fc]-NH₂ | |
| 104 | Y-Aib-EGT-αMeF(2F)-TSD-4Pal-Aib-I-αMeL-LD-Orn-K(ϵK2-γGlu-C18_OH)AQ-Aib-EFIE- | 935 |
| | αMeY-LIEGGESSGAPPPSGK[PEG₂₄-BEA-MalDap₂-Fc]-NH₂ | |
| 105 | Y-Aib-EGT-αMeF(2F)-TSD-4Pal-Aib-I-αMeL-LD-Orn-K(ϵK2-γGlu-C18_OH)AQ-Aib-EFIE- | 935 |
| | αMeY-LIEGG-Orn-SSGAPPPSGK[PEG₂₄-BEA-MalDap₂-Fc]-NH₂ | |
| 106 | Y-Aib-EGT-αMeF(2F)-TSD-4Pal-Aib-I-αMeL-LD-Orn-K(ϵK2-γGlu-C18_OH)AQ-Aib-EFIE- | 935 |
| | αMeY-LIEGGPPSGAPPPSGK[PEG₂₄-BEA-MalDap₂-Fc]-NH₂ | |
| 107 | Y-Aib-EGT-αMeF(2F)-TSD-4Pal-Aib-I-αMeL-LD-Orn-K(ϵK2-γGlu-C18_OH)AQ-Aib-EFIE- | 935 |
| | αMeY-LIEGGPPS-Aib-Orn-PPP-Orn-GK[PEG₂₄-BEA-MalDap₂-Fc]-NH₂ | |
| 108 | Y-Aib-EGT-αMeF(2F)-TSD-4Pal-Aib-I-αMeL-LD-Orn-K(ϵK2-γGlu-C18_OH)AQ-Aib-EFIE- | 935 |
| | αMeY-LIEGSPSSGAPPPGGK[PEG₂₄-BEA-MalDap₂-Fc]-NH₂ | |
| 109 | Y-Aib-EGT-αMeF(2F)-TSD-4Pal-Aib-I-αMeL-LD-Orn-K(ϵK2-γGlu-C18_OH)AQ-Aib-EFIK | 935 |
| | [PEG₂₄-BEA-MalDap₂-Fc]-αMeY-LIEGGPSSGAPPPSGG-NH₂ | |
| 110 | Y-Aib-EGT-αMeF(2F)-TSD-4Pal-Aib-I-αMeL-LD-Orn-K(ϵK2-γGlu-C18_OH)AQ-Aib-EFIK | 935 |
| | [PEG₂₄-BEA-MalDap₂-Fc]-αMeY-LIEGGESSGAPPPSGG-NH₂ | |
| 111 | Y-Aib-EGT-αMeF(2F)-TSD-4Pal-Aib-I-αMeL-LD-Orn-K(ϵK2-γGlu-C18_OH)AQ-Aib-EFIK | 935 |
| | [PEG₂₄-BEA-MalDap₂-Fc]-αMeY-LIEGG-Orn-SSGAPPPSGG-NH₂ | |
| 112 | Y-Aib-EGT-αMeF(2F)-TSD-4Pal-Aib-I-αMeL-LD-Orn-K(ϵK2-γGlu-C18_OH)AQ-Aib-EFIK | 935 |
| | [PEG₂₄-BEA-MalDap₂-Fc]-αMeY-LIEGGPPSGAPPPSGG-NH₂ | |
| 113 | Y-Aib-EGT-αMeF(2F)-TSD-4Pal-Aib-I-αMeL-LD-Orn-K(ϵK2-γGlu-C18_OH)AQ-Aib-EFIK | 935 |
| | [PEG₂₄-BEA-MalDap₂-Fc]-αMeY-LIEGGPPS-Aib-Orn-PPP-Orn-GG-NH₂ | |
| 114 | Y-Aib-EGT-αMeF(2F)-TSD-4Pal-Aib-I-αMeL-LD-Orn-K(ϵK2-γGlu-C18_OH)AQ-Aib-EFIK | 935 |
| | [PEG₂₄-BEA-MalDap₂-Fc]-αMeY-LIEGSPSSGAPPPGGG-NH₂ | |
| 115 | Y-Aib-EGT-αMeF(2F)-TSD-4Pal-Aib-I-αMeL-LD-Orn-K(ϵK2-γGlu-C18_OH)AQ-Aib-EFIE- | 935 |
| | αMeY-LIEGGGGGGGSGGGGSGGGGSK[BEA-MalDap₂-Fc]-NH₂ | |
| 116 | Y-Aib-EGT-αMeF(2F)-TSD-4Pal-Aib-I-αMeL-LD-Orn-K(ϵK2-γGlu-C18_OH)AQ-Aib-EFIE- | 935 |
| | αMeY-LIEGGPSSGK[BEA-MalDap₂-Fc]-NH₂ | |
| 117 | Y-Aib-EGT-αMeF(2F)-TSD-4Pal-Aib-I-αMeL-LD-Orn-K(ϵK2-γGlu-C18_OH)AQ-Aib-EFIE- | 935 |
| | αMeY-LIEGGG-PEG₂₄-K[BEA-MalDap₂-Fc]-NH₂ | |
| 118 | Y-Aib-EGT-αMeF(2F)-TSD-4Pal-Aib-I-αMeL-LD-Orn-K(ϵK2-γGlu-C18_OH)AQ-Aib-EFIE- | 935 |
| | αMeY-LIEGGGK[PEG₂₄-BEA-MalDap₂-Fc]-NH₂ | |
| 119 | Y-Aib-EGT-αMeF(2F)-TSD-4Pal-Aib-I-αMeL-LD-Orn-K(ϵK2-γGlu-C18_OH)AQ-Aib-EFIK | 935 |
| | [PEG₂₄-BEA-MalDap₂-Fc]-αMeY-LIEGGG-NH₂ | |
| 120 | Y-Aib-EGT-αMeF(2F)-TSD-4Pal-Aib-I-αMeL-LD-Orn-K(ϵK2-γGlu-C18_OH)AQ-Aib-EFIK | 935 |
| | [PEG₂₄-BEA-MalDap₂-Fc]-αMeY-LIEGGPSSG-NH₂ | |
| 121 | Y-Aib-EGT-αMeF(2F)-TSD-4Pal-Aib-I-αMeL-LD-Orn-K(ϵK2-γGlu-C18_OH)AQ-Aib-EFIE- | 935 |
| | αMeY-LIK[PEG₂₄-BEA-MalDap₂-Fc]GGG-NH₂ | |
| 122 | Y-Aib-EGT-αMeF(2F)-TSD-4Pal-Aib-I-αMeL-LD-Orn-K(ϵK2-γGlu-C18_OH)AQ-Aib-EFIE- | 935 |
| | αMeY-LIK[PEG₂₄-BEA-MalDap₂-Fc]GGPSSG-NH₂ | |
| 123 | Y-Aib-EGT-αMeF(2F)-TSD-4Pal-Aib-I-αMeL-LD-Orn-K(ϵK2-γGlu-C18_OH)AQ-Aib-EFIE- | 935 |
| | αMeY-LIEGGGGGGGSGGGGSGAPAPAPAPAPAPK[BEA-MalDap₂-Fc]-NH₂ | |
| 124 | Y-Aib-EGT-αMeF(2F)-TSD-4Pal-Aib-I-αMeL-LD-Orn-K(ϵK2-γGlu-C18_OH)AQ-Aib-EFIE- | 935 |
| | αMeY-LIEGGGGGGGQGGGGQGGGGQK[BEA-MalDap₂-Fc]-NH₂ | |
| 125 | Y-Aib-EGT-αMeF(2F)-TSD-4Pal-Aib-I-αMeL-LD-Orn-K(ϵK2-γGlu-C18_OH)AQ-Aib-EFIE- | 935 |
| | αMeY-LIEGGGGGGG-4Pal-GGGG-4Pal-GGGG-4Pal-K[BEA-MalDap₂-Fc]-NH₂ | |
| 126 | Y-Aib-EGT-αMeF(2F)-TSD-4Pal-Aib-I-αMeL-LD-Orn-K(ϵK2-γGlu-C18_OH)AQ-Aib-EFIE- | 935 |
| | αMeY-LIEGGPSSGK[PEG₂₄-BEA-MalDap₂-Fc]-NH₂ | |
| 127 | Y-Aib-EGT-αMeF(2F)-TSD-4Pal-Aib-I-αMeL-LD-Orn-K(AEEA2-γGlu-C18_OH)AQ-Aib-EFIK | 935 |
| | [PEG₂₄-BEA-MalDap₂-Fc]-αMeY-LIEGGG-NH₂ | |
| 128 | Y-Aib-EGT-αMeF(2F)-TSD-4Pal-Aib-I-αMeL-LD-Orn-K(AEEA2-γGlu-C18_OH)AQ-Aib-EFIK | 935 |
| | [PEG₂₄-BEA-MalDap₂-Fc]-αMeY-LIEGGPSSG-NH₂ | |
| 129 | Y-Aib-EGT-αMeF(2F)-TSD-4Pal-Aib-I-αMeL-LD-Orn-K(AEEA2-γGlu-C18_OH)AQ-Aib-EFIE- | 935 |
| | αMeY-LIK[PEG₂₄-BEA-MalDap₂-Fc]GGG-NH₂ | |
| 130 | Y-Aib-EGT-αMeF(2F)-TSD-4Pal-Aib-I-αMeL-LD-Orn-K(AEEA2-γGlu-C18_OH)AQ-Aib-EFIE- | 935 |
| | αMeY-LIK[PEG₂₄-BEA-MalDap₂-Fc]GGPSSG-NH₂ | |
| 131 | Y-Aib-EGT-αMeF(2F)-TSD-4Pal-Aib-I-αMeL-LD-Orn-K(AEEA2-γGlu-C18_OH)AQ-Aib-EFIE- | 935 |
| | αMeY-LIEGGPSSGK[PEG₂₄-BEA-MalDap₂-Fc]-NH₂ | |
| 132 | Y-Aib-EGT-αMeF(2F)-TSD-4Pal-Aib-I-αMeL-LD-Orn-K(AEEA2-γGlu-C18_OH)AQ-Aib-EFIE- | 935 |
| | αMeY-LIEGGG-PEG₂₄-K[BEA-MalDap₂-Fc]-NH₂ | |
| 133 | Y-Aib-EGT-αMeF(2F)-TSD-4Pal-Aib-I-αMeL-LD-Orn-K(AEEA2-γGlu-C18_OH)AQ-Aib-EFIE- | 935 |
| | αMeY-LIEGSPSSGAPPPSK[PEG₂₄-BEA-MalDap₂-Fc]-NH₂ | |
| 134 | Y-Aib-EGT-αMeF(2F)-TSD-4Pal-Aib-I-αMeL-LD-Orn-K(ϵK2-γGlu-C18_OH)AQ-Aib-EFIE- | 935 |
| | αMeY-LIEGSPSSGAPPPSK[PEG₂₄-BEA-MalDap₂-Fc]-NH₂ | |
| 135 | Y-Aib-EGT-αMeF(2F)-TSD-4Pal-Aib-I-αMeL-LDEK(ϵK2-γGlu-C18_OH)AQ-Aib-EFIE-αMeY- | 935 |
| | LIEGSPSSGAPPPSK[PEG₂₄-BEA-MalDap₂-Fc]-NH₂ | |
| 136 | Y-Aib-EGT-αMeF(2F)-TSD-4Pal-Aib-I-αMeL-LD-Orn-K(AEEA2-γGlu-C18_OH)AQ-Aib-EFIE- | 935 |
| | αMeY-LIEGGPSSGAPPPSK[PEG₂₄-BEA-MalDap₂-Fc]-NH₂ | |
| 137 | Y-Aib-EGT-αMeF(2F)-TSD-4Pal-Aib-I-αMeL-LD-Orn-K(ϵK2-γGlu-C18_OH)AQ-Aib-EFIE- | 935 |
| | αMeY-LIEGGPSSGAPPPSK[PEG₂₄-BEA-MalDap₂-Fc]-NH₂ | |
| 138 | Y-Aib-EGT-αMeF(2F)-TSD-4Pal-Aib-I-αMeL-LDEK(ϵK2-γGlu-C18_OH)AQ-Aib-EFIE-αMeY- | 935 |
| | LIEGGPSSGAPPPSK[PEG₂₄-BEA-MalDap₂-Fc]-NH₂ | |
| 139 | Y-Aib-EGT-αMeF(2F)-TSD-4Pal-Aib-I-αMeL-LD-Orn-K(ϵK2-γGlu-C18_OH)AQ-Aib-EFIe- | 935 |
| | αMeY-LIEGSPSSGAPPPSK(PEG₂₄-BEA-MalDap₂ Fc)-NH₂ | |
| 140 | Y-Aib-EGT-αMeF(2F)-TSD-4Pal-Aib-I-αMeL-LD-Orn-K(ϵK2-γGlu-C18_OH)AQ-Aib-EFIe- | 935 |
| | αMeY-LIEGGGK(PEG₂₄-BEA-MalDap₂ Fc)-NH₂ | |
| 141 | Y-Aib-EGT-αMeF(2F)-TSD-4Pal-Aib-I-αMeL-LD-Orn-K(ϵK2-γGlu-C18_OH)AQ-Aib-EFIE- | 935 |
| | αMeY-LIEGG-Orn-SSGAPPPSK(PEG₂₄-BEA-MalDap₂ Fc)-NH₂ | |
| 142 | Y-Aib-EGT-αMeF(2F)-TSD-4Pal-Aib-I-αMeL-LD-Orn-K(AEEA2-γGlu-C18_OH)AQ-Aib-EFIE- | 935 |
| | αMeY-LIEGG-Orn-SSGAPPPSK(PEG₂₄-BEA-MalDap₂ Fc)-NH₂ | |
| 143 | Y-Aib-EGT-αMeF(2F)-TSD-4Pal-Aib-I-αMeL-LD-Orn-K(ϵK2-γGlu-C18_OH)AQ-Aib-EFIE- | 935 |
| | αMeY-LIEGG-Orn-K(PEG₂₄-BEA-MalDap₂ Fc)-NH₂ | |
| 144 | Y-Aib-EGT-αMeF(2F)-TSD-4Pal-Aib-I-αMeL-LD-Orn-K(AEEA2-γGlu-C18_OH)AQ-Aib-EFIE- | 935 |
| | αMeY-LIEGG-Orn-K(PEG₂₄-BEA-MalDap₂ Fc)-NH₂ | |
| 145 | Y-Aib-EGT-αMeF(2F)-TSD-4Pal-Aib-I-αMeL-LD-Orn-K(ϵK2-γGlu-C18_OH)AQ-Aib-Orn-FIE- | 935 |
| | αMeY-LIEGSPSSGAPPPSK(PEG₂₄-BEA-MalDap₂ Fc)-NH₂ | |
| 146 | Y-Aib-EGT-αMeF(2F)-TSD-4Pal-Aib-I-αMeL-LD-Orn-K(AEEA2-γGlu-C18_OH)AQ-Aib-Orn- | 933 |
| | FIE-αMeY-LIEGSPSSGAPPPSK(PEG₂₄-BEA-MalDap₂ Fc)-NH₂ | |
| 147 | Y-Aib-EGT-αMeF(2F)-TSD-4Pal-Aib-I-αMeL-LD-Orn-K(AEEA2-γGlu-C18_OH)AQ-Aib-EFIQ- | 935 |
| | αMeY-LIEGSPSSGAPPPSK(PEG₂₄-BEA-MalDap₂ Fc)-NH₂ | |
| 148 | Y-Aib-EGT-αMeF(2F)-TSD-4Pal-Aib-I-αMeL-LD-Orn-K(ϵK2-γGlu-C18_OH)AQ-Aib-EFIQ- | 935 |
| | αMeY-LIEGSPSSGAPPPSK(PEG₂₄-BEA-MalDap₂ Fc)-NH₂ | |
| 149 | Y-Aib-EGT-αMeF(2F)-TSD-4Pal-Aib-I-αMeL-LD-Orn-K(ϵK2-γGlu-C18_OH)AQ-Aib-EFIE- | 935 |
| | αMeY-LIEGSPSSGAPPPSK(AEEA6-GPAPAPAPAPAPA-BEA-MalDap₂-Fc)-NH₂ | |
| 150 | Y-Aib-EGT-αMeF(2F)-TSD-4Pal-Aib-I-αMeL-LD-Orn-K(ϵK2-γGlu-C18_OH)AQ-Aib-EFIe- | 935 |
| | αMeY-LIEGSPSSGAPPPSK(AEEA6-GPAPAPAPAPAPA-BEA-MalDap₂-Fc)-NH₂ | |
| 151 | Y-Aib-EGT-αMeF(2F)-TSD-4Pal-Aib-I-αMeL-LD-Orn-K(AEEA2-γGlu-C18_OH)AQ-Aib-EFIE- | 935 |
| | αMeY-LIEGSPSSGAPPPSK(AEEA4-GPAPAPAPAPAPA-BEA-MalDap₂-Fc)-NH₂ | |
| 152 | Y-Aib-EGT-αMeF(2F)-TSD-4Pal-Aib-I-αMeL-LD-Orn-K(AEEA2-γGlu-C18_OH)AQ-Aib-EFIE- | 935 |
| | αMeY-LIEGSPSSGAPPPSK(AEEA4-GPAPAPAPA-BEA-MalDap₂-Fc)-NH₂ | |
| 153 | Y-Aib-EGT-αMeF(2F)-TSD-4Pal-Aib-I-αMeL-LD-Orn-K(AEEA2-γGlu-C18_OH)AQ-Aib-EFIE- | 935 |
| | αMeY-LIEGSPSSGAPPPSK(AEEA4-GPAPA-BEA-MalDap₂-Fc)-NH₂ | |
| 154 | Y-Aib-EGT-αMeF(2F)-TSD-4Pal-Aib-I-αMeL-LD-Orn-K(AEEA2-γGlu-C18_OH)AQ-Aib-EFIE- | 935 |
| | αMeY-LIEGSPSSGAPPPSK(AEEA6-GPAPAPAPAPAPA-BEA-MalDap₂-Fc)-NH₂ | |
| 155 | Y-Aib-EGT-αMeF(2F)-TSD-4Pal-Aib-I-αMeL-LD-Orn-K(AEEA2-γGlu-C18_OH)AQ-Aib-EFIE- | 935 |
| | αMeY-LIEGSPSSGAPPPSK(AEEA6-GPAPAPAPA-BEA-MalDap₂-Fc)-NH₂ | |
| 156 | Y-Aib-EGT-αMeF(2F)-TSD-4Pal-Aib-I-αMeL-LD-Orn-K(AEEA2-γGlu-C18_OH)AQ-Aib-EFIE- | 935 |
| | αMeY-LIEGSPSSGAPPPSK(AEEA6-GPAPA-BEA-MalDap₂-Fc)-NH₂ | |
| 157 | Y-Aib-EGT-αMeF(2F)-TSD-4Pal-SI-αMeL-LD-Orn-K(AEEA2-γGlu-C18_OH)AQ-Aib-EFIE-αMeY- | 935 |
| | LIEGSPSSGAPPPSK(AEEA6-GPAPAPAPAPAPA-BEA-MalDap₂-Fc)-NH₂ | |
| 158 | Y-Aib-EGT-αMeF(2F)-TSD-4Pal-SI-αMeL-LD-Orn-K(ϵK2-γGlu-C18_OH)AQ-Aib-EFIE-αMeY- | 935 |
| | LIEGSPSSGAPPPSK(AEEA6-GPAPAPAPAPAPA-BEA-MalDap₂-Fc)-NH₂ | |
| 159 | Y-Aib-EGT-αMeF(2F)-TSD-4Pal-SI-αMeL-LD-Orn-K(ϵK2-γGlu-C18_OH)AQ-Aib-EFIe-αMeY- | 935 |
| | LIEGSPSSGAPPPSK(AEEA6-GPAPAPAPAPAPA-BEA-MalDap₂-Fc)-NH₂ | |
| 160 | Y-Aib-EGT-αMeF(2F)-TSD-4Pal-Aib-I-αMeL-LD-Orn-K(AEEA2-γGlu-C18_OH)AQ-Aib-EFIE- | 935 |
| | αMeY-LIEGSPSSGAPPPSK(AEEA4-BEA-MalDap₂-Fc)-NH₂ | |
| 161 | Y-Aib-EGT-αMeF(2F)-TSD-4Pal-Aib-I-αMeL-LD-Orn-K(AEEA2-γGlu-C18_OH)AQ-Aib-EFIE- | 935 |
| | αMeY-LIEGSPSSGAPPPSK(AEEA6-BEA-MalDap₂-Fc)-NH₂ | |
| 162 | Y-Aib-EGT-αMeF(2F)-TSD-4Pal-Aib-I-αMeL-LD-Orn-K(AEEA2-γGlu-C18_OH)AQ-Aib-EFIE- | 935 |
| | αMeY-LIEGSPSSGAPPPSK(AEEA8-BEA-MalDap₂-Fc)-NH₂ | |
| 163 | Y-Aib-EGT-αMeF(2F)-TSD-4Pal-Aib-I-αMeL-LD-Orn-K(AEEA2-γGlu-C18_OH)AQ-Aib-EFIE- | 935 |
| | αMeY-LIE-Aib-SPSSGAPPPSK[PEG₂₄-BEA-MalDap₂-Fc]-NH₂ | |
| 164 | Y-Aib-EGT-αMeF(2F)-TSD-4Pal-Aib-I-αMeL-LD-Orn-K(ϵK2-γGlu-C18_OH)AQ-Aib-EFIE- | 935 |
| | αMeY-LIE-Aib-SPSSGAPPPSK[PEG₂₄-BEA-MalDap₂-Fc]-NH₂ | |
| 165 | Y-Aib-EGT-αMeF(2F)-TSD-4Pal-Aib-I-αMeL-LD-Orn-K(ϵK2-γGlu-C18_OH)AQ-Aib-EFIe- | 935 |
| | αMeY-LIE-Aib-SPSSGAPPPSK[PEG₂₄-BEA-MalDap₂-Fc]-NH₂ | |
| 166 | Y-Aib-EGT-αMeF(2F)-TSD-4Pal-SI-αMeL-LD-Orn-K(AEEA2-γGlu-C18_OH)AQ-Aib-EFIE-αMeY- | 935 |
| | LIEGSPSSGAPPPSK[PEG₂₄-BEA-MalDap₂-Fc]-NH₂ | |
| 167 | Y-Aib-EGT-αMeF(2F)-TSD-4Pal-SI-αMeL-LD-Orn-K(AEEA2-γGlu-C18_OH)AQ-Aib-EFIQ-αMeY- | 935 |
| | LIEGSPSSGAPPPSK[PEG₂₄-BEA-MalDap₂-Fc]-NH₂ | |
| 168 | Y-Aib-EGT-αMeF(2F)-TSD-4Pal-SI-αMeL-LD-Orn-K(ϵK2-γGlu-C18_OH)AQ-Aib-EFIE-αMeY- | 935 |
| | LIEGSPSSGAPPPSK[PEG₂₄-BEA-MalDap₂-Fc]-NH₂ | |
| 169 | Y-Aib-EGT-αMeF(2F)-TSD-4Pal-SI-αMeL-LD-Orn-K(ϵK2-γGlu-C18_OH)AQ-Aib-EFIQ-αMeY- | 935 |
| | LIEGSPSSGAPPPSK[PEG₂₄-BEA-MalDap₂-Fc]-NH₂ | |
| 170 | Y-Aib-EGT-αMeF(2F)-TSDY-Aib-I-αMeL-LD-Orn-K(AEEA2-γGlu-C18_OH)AQ-Aib-EFIE-αMeY- | 935 |
| | LIEGSPSSGAPPPSK[PEG₂₄-BEA-MalDap₂-Fc]-NH₂ | |
| 171 | Y-Aib-EGT-αMeF(2F)-TSDY-Aib-I-αMeL-LD-Orn-K(AEEA2-γGlu-C18_OH)AQ-Aib-EFIQ-αMeY- | 935 |
| | LIEGSPSSGAPPPSK[PEG₂₄-BEA-MalDap₂-Fc]-NH₂ | |
| 172 | Y-Aib-EGT-αMeF(2F)-TSDY-Aib-I-αMeL-LD-Orn-K(ϵK2-γGlu-C18_OH)AQ-Aib-EFIe-αMeY- | 935 |
| | LIEGSPSSGAPPPSK[PEG₂₄-BEA-MalDap₂-Fc]-NH₂ | |
| 173 | Y-Aib-EGT-αMeF(2F)-TSDY-Aib-I-αMeL-LD-Orn-K(ϵK2-γGlu-C18_OH)AQ-Aib-EFIE-αMeY- | 935 |
| | LIEGSPSSGAPPPSK[PEG₂₄-BEA-MalDap₂-Fc]-NH₂ | |
| 174 | Y-Aib-EGT-αMeF(2F)-TSDY-Aib-I-αMeL-LD-Orn-K(ϵK2-γGlu-C18_OH)AQ-Aib-EFIQ-αMeY- | 935 |
| | LIEGSPSSGAPPPSK[PEG₂₄-BEA-MalDap₂-Fc]-NH₂ | |
| 175 | Y-Aib-EGT-αMeF(2F)-TSD-4Pal-Aib-I-αMeL-LD-Orn-K(ϵK2-γGlu-C18_OH)AQ-αMeL-EFIE- | 935 |
| | αMeY-LIEGSPSSGAPPPSK[PEG₂₄-BEA-MalDap₂-Fc]-NH₂ | |
| 176 | Y-Aib-EGT-αMeF(2F)-TSD-4Pal-Aib-I-αMeL-LD-Orn-K(ϵK2-γGlu-C18_OH)AQ-Iva-EFIE- | 935 |
| | αMeY-LIEGSPSSGAPPPSK[PEG₂₄-BEA-MalDap₂-Fc]-NH₂ | |
| 177 | Y-Aib-EGT-αMeF(2F)-TSD-4Pal-Aib-I-αMeL-LD-Orn-K(AEEA2-γGlu-C18_OH)AQ-αMeL-EFIQ- | 935 |
| | αMeY-LIEGSPSSGAPPPSK[PEG₂₄-BEA-MalDap₂-Fc]-NH₂ | |
| 178 | Y-Aib-EGT-αMeF(2F)-TSD-4Pal-Aib-I-αMeL-LD-Orn-K(AEEA2-γGlu-C18_OH)AQ-Iva-EFIQ- | 935 |
| | αMeY-LIEGSPSSGAPPPSK[PEG₂₄-BEA-MalDap₂-Fc]-NH₂ | |
| 179 | Y-Aib-EGT-αMeF(2F)-TSD-4Pal-Aib-I-αMeL-LD-Orn-K(ϵK2-γGlu-C18_OH)AQ-αMeL-EFIQ- | 935 |
| | αMeY-LIEGSPSSGAPPPSK[PEG₂₄-BEA-MalDap₂-Fc]-NH₂ | |
| 180 | Y-Aib-EGT-αMeF(2F)-TSD-4Pal-Aib-I-αMeL-LD-Orn-K(ϵK2-γGlu-C18_OH)AQ-Iva-EFIQ- | 935 |
| | αMeY-LIEGSPSSGAPPPSK[PEG₂₄-BEA-MalDap₂-Fc]-NH₂ | |
| 181 | Y-Aib-EGT-αMeF(2F)-TSD-4Pal-Aib-I-αMeL-LD-Orn-K(AEEA2-γGlu-C18_OH)AQ-Aib-QFIE- | 935 |
| | αMeY-LIEGSPSSGAPPPSK[PEG₂₄-BEA-MalDap₂-Fc]-NH₂ | |
| 182 | Y-Aib-EGT-αMeF(2F)-TSD-4Pal-Aib-I-αMeL-LD-Orn-K(ϵK2-γGlu-C18_OH)AQ-Aib-EFIQ- | 935 |
| | αMeY-LLEGSPSSGAPPPSK[PEG₂₄-BEA-MalDap₂-Fc]-NH₂ | |
| 183 | Y-Aib-EGT-αMeF(2F)-TSD-4Pal-SI-αMeL-LD-Orn-K(AEEA2-γGlu-C18_OH)AQ-Aib-EFIQ-αMeY- | 935 |
| | LIEGSPSSGAPPPSK(AEEA6-GPAPAPAPAPAPA-BEA-MalDap₂-Fc)-NH₂ | |
| 184 | Y-Aib-EGT-αMeF(2F)-TSD-4Pal-SI-αMeL-LD-Orn-K(AEEA2-γGlu-C18_OH)AQ-Aib-EFIQ-αMeY- | 935 |
| | LIEGSPSSGAPPPSK(2-[2-(2-amino-ethoxy)-ethoxy]-acetyl)-BEA-MalDap₂-Fc)-NH₂ | |
| 185 | Y-Aib-EGT-αMeF(2F)-TSD-4Pal-SI-αMeL-LD-Orn-K(ϵK2-γGlu-C18_OH)AQ-Aib-EFIQ-αMeY- | 935 |
| | LIEGSPSSGAPPPSK(2-[2-(2-amino-ethoxy)-ethoxy]-acetyl)₆-BEA-MalDap₂-Fc)-NH₂ | |
| 186 | Y-Aib-EGT-αMeF(2F)-TSD-4Pal-SI-αMeL-LD-Orn-K(AEEA2-γGlu-C18_OH)AQ-Aib-EFIE-αMeY- | 935 |
| | LIEGGGGGGGSGGGGSGAPAPAPAPAPAPK[BEA-MalDap₂-Fc]-NH₂ | |
| 187 | Y-Aib-EGT-αMeF(2F)-TSD-4Pal-SI-αMeL-LD-Orn-K(AEEA2-γGlu-C18_OH)AQ-Aib-EFIQ-αMeY- | 935 |
| | LIEGGGGGGGSGGGGSGGGGSK[BEA-MalDap₂-Fc]-NH₂ | |
| 188 | Y-Aib-EGT-αMeF(2F)-TSD-4Pal-SI-αMeL-LD-Orn-K(AEEA2-γGlu-C18_OH)AQ-Aib-EFIQ-αMeY- | 935 |
| | LIEGGGGGGGSGGGGSGAPAPAPAPAPAPK[BEA-MalDap₂-Fc]-NH₂ | |
| 189 | Y-Aib-EGT-αMeF(2F)-TSD-4Pal-SI-αMeL-LD-Orn-K(ϵK2-γGlu-C18_OH)AQ-Aib-EFIE-αMeY- | 935 |
| | LIEGGGGGGGSGGGGGGGGSK[BEA-MalDap₂-Fc]-NH₂ | |
| 190 | Y-Aib-EGT-αMeF(2F)-TSD-4Pal-SI-αMeL-LD-Orn-K(ϵK2-γGlu-C18_OH)AQ-Aib-EFIQ-αMeY- | 935 |
| | LIEGGGGGGGSGGGGSGGGGSK[BEA-MalDap₂-Fc]-NH₂ | |
| 191 | Y-Aib-EGT-αMeF(2F)-TSD-4Pal-SI-αMeL-LD-Orn-K(ϵK2-γGlu-C18_OH)AQ-Aib-EFIQ-αMeY- | 935 |
| | LIEGGGGGGGSGGGGSGAPAPAPAPAPAPK[BEA-MalDap₂-Fc]-NH₂ | |
| 192 | Y-Aib-EGT-αMeF(2F)-TSD-4Pal-Aib-I-αMeL-LD-Orn-K(AEEA2-γGlu-C18_OH)AQ-Aib-EFIQ- | 935 |
| | αMeY-LIEGSPSSGAPPPSK(AEEA6-GPAPAPAPAPAPA-BEA-MalDap₂-Fc)-NH₂ | |
| 193 | Y-Aib-EGT-αMeF(2F)-TSD-4Pal-Aib-I-αMeL-LD-Orn-K(AEEA2-γGlu-C18_OH)AQ-Aib-EFIQ- | 935 |
| | αMeY-LIEGSPSSGAPPPSK(2-[2-(2-amino-ethoxy)-ethoxy]-acetyl)-BEA-MalDap₂-Fc)-NH₂ | |
| 194 | Y-Aib-EGT-αMeF(2F)-TSD-4Pal-Aib-I-αMeL-LD-Orn-K(AEEA2-γGlu-C18_OH)AQ-Aib-EFIE- | 935 |
| | αMeY-LIEGGGGGGGSGGGGSGAPAPAPAPAPAPK[BEA-MalDap₂-Fc]-NH₂ | |
| 195 | Y-Aib-EGT-αMeF(2F)-TSD-4Pal-Aib-I-αMeL-LD-Orn-K(AEEA2-γGlu-C18_OH)AQ-Aib-EFIQ- | 935 |
| | αMeY-LIEGGGGGGGSGGGGSGGGGSK[BEA-MalDap₂-Fc]-NH₂ | |
| 196 | Y-Aib-EGT-αMeF(2F)-TSD-4Pal-Aib-I-αMeL-LD-Orn-K(AEEA2-γGlu-C18_OH)AQ-Aib-EFIQ- | 935 |
| | αMeY-LIEGGGGGGGSGGGGSGAPAPAPAPAPAPK[BEA-MalDap₂-Fc]-NH₂ | |
| 197 | Y-Aib-EGT-αMeF(2F)-TSD-4Pal-Aib-I-αMeL-LD-Orn-K(AEEA2-γGlu-C18_OH)AQ-Aib-DFIQ- | 935 |
| | αMeY-LIEGSPSSGAPPPSK(AEEA6-BEA-MalDap₂)-NH₂ | |
| 198 | Y-Aib-EGT-αMeF(2F)-TSD-4Pal-SI-αMeL-LD-Orn-K(AEEA2-γGlu-C18_OH)AQ-Aib-EFIK | 935 |
| | [PEG₂₄-BEA-MalDap₂-Fc]-αMeY-LIEGSPSSGAPPPS-NH₂ | |
| 199 | Y-Aib-EGT-αMeF(2F)-TSD-4Pal-Aib-I-αMeL-LD-Orn-K(AEEA2-γGlu-C18_OH)AQ-Aib-EFIK | 935 |
| | [PEG₂₄-BEA-MalDap₂-Fc]-αMeY-LIEGSPSSGAPPPS-NH₂ | |
| 200 | Y-Aib-EGT-αMeF(2F)-TSD-4Pal-SI-αMeL-LD-Orn-K(AEEA2-γGlu-C18_OH)AQ-Aib-EFIK | 935 |
| | (AEEA6-BEA-MalDap₂-Fc)-αMeY-LIEGSPSSGAPPPS-NH₂ | |
| 201 | Y-Aib-EGT-αMeF(2F)-TSD-4Pal-Aib-I-αMeL-LD-Orn-K(AEEA2-γGlu-C18_OH)AQ-Aib-EFIK | 935 |
| | (AEEA6-BEA-MalDap₂-Fc)-αMeY-LIEGSPSSGAPPPS-NH₂ | |
| 202 | Y-Aib-EGT-αMeF(2F)-TSD-4Pal-Aib-I-αMeL-LD-Orn-K(ϵK-AEEA-γGlu-C18_OH)AQ-Aib-EFIQ- | 935 |
| | αMeY-LIEGSPSSGAPPPSK(AEEA6-BEA-MalDap₂-Fc)-NH₂ | |
| 203 | Y-Aib-EGT-αMeF(2F)-TSD-4Pal-Aib-I-αMeL-LD-Orn-K(AEEA-eK-γGlu-C18_OH)AQ-Aib-EFIQ- | 935 |
| | αMeY-LIEGSPSSGAPPPSK(AEEA6-BEA-MalDap₂-Fc)-NH₂ | |
| 204 | Y-Aib-EGT-αMeF(2F)-TSD-4Pal-Aib-I-αMeL-LD-Orn-K(ϵK2-γGlu-C18_OH)AQ-Aib-EFIE- | 935 |
| | αMeY-LIEGSPSSGAPPPSK(AEEA6-BEA-MalDap₂-Fc)-NH₂ | |
| 205 | Y-Aib-EGT-αMeF(2F)-TSD-4Pal-SI-αMeL-LD-Orn-K(ϵK2-γGlu-C18_OH)AQ-Aib-EFIE-αMeY- | 935 |
| | LIEGSPSSGAPPPSK(AEEA6-BEA-MalDap₂-Fc)-NH₂ | |
| 206 | Y-Aib-EGT-αMeF(2F)-TSDY-Aib-I-αMeL-LD-Orn-K(AEEA2-γGlu-C18_OH)AQ-Aib-EFIE-αMeY- | 935 |
| | LIEGSPSSGAPPPSK(AEEA6-BEA-MalDap₂-Fc)-NH₂ | |
| 207 | Y-Aib-EGT-αMeF(2F)-TSDY-Aib-I-αMeL-LD-Orn-K(AEEA2-γGlu-C18_OH)AQ-Aib-EFIQ-αMeY- | 935 |
| | LIEGSPSSGAPPPSK(AEEA6-BEA-MalDap₂-Fc)-NH₂ | |
| 208 | Y-Aib-EGT-αMeF(2F)-TSDY-Aib-I-αMeL-LD-Orn-K(ϵK2-γGlu-C18_OH)AQ-Aib-EFIE-αMeY- | 935 |
| | LIEGSPSSGAPPPSK(AEEA6-BEA-MalDap₂-Fc)-NH₂ | |
| 209 | Y-Aib-EGT-αMeF(2F)-TSDY-Aib-I-αMeL-LD-Orn-K(ϵK2-γGlu-C18_OH)AQ-Aib-EFIQ-αMeY- | 935 |
| | LIEGSPSSGAPPPSK(AEEA6-BEA-MalDap₂-Fc)-NH₂ | |
| 210 | Y-Aib-EGT-αMeF(2F)-TSDYSI-αMeL-LD-Orn-K(AEEA2-γGlu-C18_OH)AQ-Aib-EFIE-αMeY- | 935 |
| | LIEGSPSSGAPPPSK(AEEA6-BEA-MalDap₂-Fc)-NH₂ | |
| 211 | Y-Aib-EGT-αMeF(2F)-TSDYSI-αMeL-LD-Orn-K(AEEA2-γGlu-C18_OH)AQ-Aib-EFIQ-αMeY- | 935 |
| | LIEGSPSSGAPPPSK(AEEA6-BEA-MalDap₂-Fc)-NH₂ | |
| 212 | Y-Aib-EGT-αMeF(2F)-TSDYSI-αMeL-LD-Orn-K(ϵK2-γGlu-C18_OH)AQ-Aib-EFIE-αMeY- | 935 |
| | LIEGSPSSGAPPPSK(AEEA6-BEA-MalDap₂-Fc)-NH₂ | |
| 213 | Y-Aib-EGT-αMeF(2F)-TSDYSI-αMeL-LD-Orn-K(ϵK2-γGlu-C18_OH)AQ-Aib-EFIQ-αMeY- | 935 |
| | LIEGSPSSGAPPPSK(AEEA6-BEA-MalDap₂-Fc)-NH₂ | |
| 214 | Y-Aib-EGT-αMeF(2F)-TSD-4Pal-Aib-I-αMeL-LD-Orn-K(ϵK2-γGlu-C18-OH)AQ-Aib-EFIQ- | 935 |
| | αMeY-LIEGGGGGGGQGGGGQGGGGQK[BEA-MalDap₂-Fc]-NH₂ | |
| 215 | Y-Aib-EGT-αMeF(2F)-TSD-4Pal-SI-αMeL-LD-Orn-K(ϵK2-γGlu-C18-OH)AQ-Aib-EFIQ-αMeY- | 935 |
| | LIEGGGGGGGQGGGGQGGGGQK[BEA-MalDap₂-Fc]-NH₂ | |
| 216 | Y-Aib-EGT-αMeF(2F)-TSDY-Aib-I-αMeL-LD-Orn-K(AEEA2-γGlu-C18_OH)AQ-Aib-EFIE-αMeY- | 935 |
| | LIEGGGGGGGSGGGGSGGGGSK[BEA-MalDap₂-Fc]-NH₂ | |
| 217 | H-Aib-EGT-αMeF(2F)-TSD-4Pal-SI-αMeL-LD-Orn-K(AEEA2-γGlu-C18_OH)AQ-Aib-EFIE-αMeY- | 935 |
| | LIEGGGGGGGSGGGGSGGGGSK[BEA-MalDap₂-Fc]-NH₂ | |
| 218 | H-Aib-EGT-αMeF(2F)-TSD-4Pal-SI-αMeL-LD-Orn-K(ϵK2-γGlu-C18_OH)AQ-Aib-EFIE-αMeY- | 935 |
| | LIEGSPSSGAPPPS[PEG₂₄-BEA-MalDap₂-Fc]-NH₂ | |
| 219 | Y-Aib-EGT-αMeF(2F)-TSD-4Pal-Aib-I-αMeL-LD-Orn-K(AEEA2-γGlu-C18_OH)AQ-Aib-EFIE- | 935 |
| | αMeY-LIEQGGGGGGSGGGGSGGGGSK[BEA-MalDap₂-Fc]-NH₂ | |
| 220 | Y-Aib-EGT-αMeF(2F)-TSD-4Pal-SI-αMeL-LD-Orn-K(ϵK2-γGlu-C18_OH)AQ-Aib-EFIe-αMeY- | 935 |
| | LIEGGPSSGAPPPS[PEG₂₄-BEA-MalDap₂-Fc]-NH₂ | |
| 221 | Y-Aib-EGT-αMeF(2F)-TSD-4Pal-Aib-I-αMeL-LD-Orn-K(ϵK2-γGlu-C18_OH)AQ-Aib-EFIe- | 935 |
| | αMeY-LIEGGPSSGAPPPS[PEG₂₄-BEA-MalDap₂-Fc]-NH₂ | |
| 222 | Y-Aib-EGT-αMeF(2F)-TSDY-Aib-I-αMeL-LD-Orn-K(AEEA2-γGlu-C18_OH)AQ-Aib-EFIe-αMeY- | 935 |
| | LIEGGPSSGAPPPS[PEG₂₄-BEA-MalDap₂-Fc]-NH₂ | |
| 223 | Y-Aib-EGT-αMeF(2F)-TSDY-Aib-I-αMeL-LD-Orn-K(ϵK2-γGlu-C18_OH)AQ-Aib-EFIe-αMeY- | 935 |
| | LIEGGPSSGAPPPS[PEG₂₄-BEA-MalDap₂-Fc]-NH₂ | |
| 224 | Y-Aib-EGT-αMeF(2F)-TSD-4Pal-SI-αMeL-LD-Orn-K(AEEA2-γGlu-C18_OH)AQ-Aib-EFIe-αMeY- | 935 |
| | LIAGSPSSGAPPPS[PEG₂₄-BEA-MalDap₂-Fc]-NH₂ | |
| 225 | Y-Aib-EGT-αMeF(2F)-TSD-4Pal-SI-αMeL-LD-Orn-K(ϵK2-γGlu-C18_OH)AQ-Aib-EFIe-αMeY- | 935 |
| | LIAGSPSSGAPPPS[PEG₂₄-BEA-MalDap₂-Fc]-NH₂ | |
| 226 | Y-Aib-EGT-αMeF(2F)-TSD-4Pal-Aib-I-αMeL-LD-Orn-K(ϵK2-γGlu-C18_OH)AQ-Aib-EFIe- | 935 |
| | αMeY-LIAGSPSSGAPPPS[PEG₂₄-BEA-MalDap₂-Fc]-NH₂ | |
| 227 | Y-Aib-EGT-αMeF(2F)-TSDY-Aib-I-αMeL-LD-Orn-K(AEEA2-γGlu-C18_OH)AQ-Aib-EFIe-αMeY- | 935 |
| | LIAGSPSSGAPPPS[PEG₂₄-BEA-MalDap₂-Fc]-NH₂ | |
| 228 | Y-Aib-EGT-αMeF(2F)-TSDY-Aib-I-αMeL-LD-Orn-K(ϵK2-γGlu-C18_OH)AQ-Aib-EFIe-αMeY- | 935 |
| | LIAGSPSSGAPPPS[PEG₂₄-BEA-MalDap₂-Fc]-NH₂ | |
| 229 | Y-Aib-EGT-αMeF(2F)-TSD-4Pal-SI-αMeL-LD-Orn-K(ϵK2-γGlu-C18_OH)AQ-Aib-EFIe-αMeY- | 935 |
| | LIAGGPSSGAPPPS[PEG₂₄-BEA-MalDap₂-Fc]-NH₂ | |
| 230 | Y-Aib-EGT-αMeF(2F)-TSD-4Pal-SI-αMeL-LD-Orn-K(AEEA2-γGlu-C18_OH)AQ-Aib-EFIe-αMeY- | 935 |
| | LIAGGPSSGAPPPS[PEG₂₄-BEA-MalDap₂-Fc]-NH₂ | |
| 231 | Y-Aib-EGT-αMeF(2F)-TSDY-Aib-I-αMeL-LD-Orn-K(ϵK2-γGlu-C18_OH)AQ-Aib-EFIe-αMeY- | 935 |
| | LIAGGPSSGAPPPS[PEG₂₄-BEA-MalDap₂-Fc]-NH₂ | |
| 232 | Y-Aib-EGT-αMeF(2F)-TSDY-Aib-I-αMeL-LD-Orn-K(AEEA2-γGlu-C18_OH)AQ-Aib-EFIe-αMeY- | 935 |
| | LIAGGPSSGAPPPS[PEG₂₄-BEA-MalDap₂-Fc]-NH₂ | |
| 233 | Y-Aib-EGT-αMeF(2F)-TSD-4Pal-SI-αMeL-LD-Orn-K(AEEA-γGlu-C18_OH)AQ-Aib-EFIe-αMeY- | 935 |
| | LIEGSPSSGAPPPS[PEG₂₄-BEA-MalDap₂-Fc]-NH₂ | |
| 234 | Y-Aib-EGT-αMeF(2F)-TSDY-Aib-I-αMeL-LD-Orn-K(AEEA-γGlu-C18_OH)AQ-Aib-EFIe-αMeY- | 935 |
| | LIEGSPSSGAPPPS[PEG₂₄-BEA-MalDap₂-Fc]-NH₂ | |
| 235 | Y-Aib-EGT-αMeF(2F)-TSD-4Pal-SI-αMeL-LD-Orn-K(ϵK2-γGlu-C18_OH)AQ-Aib-EFIe-αMeY- | 935 |
| | LVEGSPSSGAPPPS[PEG₂₄-BEA-MalDap₂-Fc]-NH₂ | |
| 236 | Y-Aib-EGT-αMeF(2F)-TSD-4Pal-SI-αMeL-LD-Orn-K(AEEA2-γGlu-C18_OH)AQ-Aib-EFIE-αMeY- | 935 |
| | LIAGSPSSGAPPPS[PEG₂₄-BEA-MalDap₂-Fc]-NH₂ | |
| 237 | Y-Aib-EGT-αMeF(2F)-TSD-4Pal-SI-αMeL-LD-Orn-K(ϵK2-γGlu-C18_OH)AQ-Aib-EFIE-αMeY- | 935 |
| | LIAGSPSSGAPPPS[PEG₂₄-BEA-MalDap₂-Fc]-NH₂ | |
| 238 | Y-Aib-EGT-αMeF(2F)-TSDY-Aib-I-αMeL-LD-Orn-K(AEEA2-γGlu-C18_OH)AQ-Aib-EFIE-αMeY- | 935 |
| | LIAGSPSSGAPPPS[PEG₂₄-BEA-MalDap₂-Fc]-NH₂ | |
| 239 | Y-Aib-EGT-αMeF(2F)-TSDY-Aib-I-αMeL-LD-Orn-K(ϵK2-γGlu-C18_OH)AQ-Aib-EFIE-αMeY- | 935 |
| | LIAGSPSSGAPPPS-NH₂ | |
| 240 | Y-Aib-EGT-αMeF(2F)-TSD-4Pal-SI-αMeL-LD-Orn-K(ϵK2-γGlu-C18_OH)AQ-Aib-EFIe-αMeY- | 935 |
| | LIEGSPSSGAPPPS-NH₂ | |
| 241 | Y-Aib-EGT-αMeF(2F)-TSD-4Pal-SI-αMeL-LD-Orn-K(ϵK2-γGlu-C18_OH)AQ-Aib-EFIe-αMeY- | 935 |
| | LIEGSPSSGAPPPS-NH₂ | |
| 242 | Y-Aib-EGT-αMeF(2F)-TSD-4Pal-SI-αMeL-LD-Orn-K(ϵK2-γGlu-C18_OH)AQ-Aib-EFIe-αMeY- | 935 |
| | LIEGSPSSGAPPPS-NH₂ | |
| 243 | Y-Aib-EGT-αMeF(2F)-TSD-4Pal-SI-αMeL-LDEK(Ac)AQ-Aib-EFIe-αMeY-LIEGSPSSGAPPPS-NH₂ | 935 |
| 244 | Y-Aib-EGT-αMeF(2F)-TSD-4Pal-SI-αMeL-LDEQAQ-Aib-EFIe-αMeY-LIEGSPSSGAPPPS[PEG₂₄- | 935 |
| | BEA-MalDap₂-Fc]-NH₂ | |
| 245 | Y-Aib-EGT-αMeF(2F)-TSD-4Pal-SI-αMeL-LDEQAQ-Aib-EFIe-αMeY-LIEGSPSSGAPPPSK(PEG₂₄- | 936 |
| | BEA-MalDap₂-Fc KRQ)-NH₂ | |
| 246 | Y-Aib-EGT-αMeF(2F)-TSD-4Pal-SI-αMeL-LD-Orn-K(AEEA2-γGlu-C20_OH)AQ-Aib-EFIe-αMeY- | 935 |
| | LIEGSPSSGAPPPS[PEG₂₄-BEA-MalDap₂-Fc]-NH₂ | |
| 247 | Y-Aib-EGT-αMeF(2F)-TSD-4Pal-SI-αMeL-LD-Orn-K(AEEA2-γGlu-C16_OH)AQ-Aib-EFIe-αMeY- | 935 |
| | LIEGSPSSGAPPPS[PEG₂₄-BEA-MalDap₂-Fc]-NH₂ | |
| 248 | Y-Aib-EGT-αMeF(2F)-TSD-4Pal-SI-αMeL-LDEK(AEEA2-γGlu-C16_OH)AQ-Aib-EFIe-αMeY- | 935 |
| | LIEGSPSSGAPPPS[PEG₂₄-BEA-MalDap₂-Fc]-NH₂ | |
| 249 | Y-Aib-EGT-αMeF(2F)-TSD-4Pal-SI-αMeL-LD-Orn-K(ϵK2-γGlu-C20_OH)AQ-Aib-EFIe-αMeY- | 935 |
| | LIEGSPSSGAPPPS[PEG₂₄-BEA-MalDap₂-Fc]-NH₂ | |
| 250 | Y-Aib-EGT-αMeF(2F)-TSD-4Pal-SI-αMeL-LDEK(ϵK2-γGlu-C20_OH)AQ-Aib-EFIe-αMeY- | 935 |
| | LIEGSPSSGAPPPS[PEG₂₄-BEA-MalDap₂-Fc]-NH₂ | |
| 251 | Y-Aib-EGT-αMeF(2F)-TSD-4Pal-SI-αMeL-LD-Orn-K(AEEA2-γGlu-C16_OH)AQ-Aib-EFIE-αMeY- | 935 |
| | LIEGGGGGGGSGGGGSGGGGSK[BEA-MalDap₂-Fc]-NH₂ | |
| 252 | Y-Aib-EGT-αMeF(2F)-TSD-4Pal-SI-αMeL-LDEK(γGlu-AEEA-ϵK-C20_OH)AQ-Aib-EFIe-αMeY- | 935 |
| | LIEGSPSSGAPPPS-[PEG₂₄-BEA-MalDap₂-Fc]NH₂ | |
| 253 | Y-Aib-EGT-αMeF(2F)-TSD-4Pal-Aib-I-αMeL-LD-Orn-K(AEEA2-γGlu-C16_OH)AQ-Aib-EFIE- | 935 |
| | αMeY-LIEGGGGGGGSGGGGSGGGGSK[BEA-MalDap₂-Fc)-NH₂ | |
| 254 | Y-Aib-EGT-αMeF(2F)-TSD-4Pal-Aib-I-αMeL-LD-Orn-K(AEEA2-γGlu-C16_OH)AQ-Aib-EFIE- | 935 |
| | αMeY-LIEGGPSSGK(PEG₂₄-BEA-MalDap₂-Fc)-NH₂ | |
| 255 | Y-Aib-EGT-αMeF(2F)-TSD-4Pal-Aib-I-αMeL-LD-Orn-K(AEEA2-γGlu-C16_OH)AQ-Aib-EFIE- | 935 |
| | αMeY-LIEGGG-PEG₂₄-K[BEA-MalDap₂-Fc]-NH₂ | |
| 256 | Y-Aib-EGT-αMeF(2F)-TSD-4Pal-Aib-I-αMeL-LD-Orn-K(AEEA2-γGlu-C16_OH)AQ-Aib-EFIE- | 935 |
| | αMeY-LIEGGGK(PEG₂₄-BEA-MalDap₂-Fc)-NH₂ | |
| 257 | Y-Aib-EGT-αMeF(2F)-TSD-4Pal-Aib-I-αMeL-LDEK(ϵK2-γGlu-C16_OH)AQ-Aib-EFIE-αMeY- | 935 |
| | LIEGGPSSGK[PEG₂₄-BEA-MalDap₂-Fc]-NH₂ | |
| 258 | Y-Aib-EGT-αMeF(2F)-TSD-4Pal-Aib-I-αMeL-LDEK(ϵK2-γGlu-C16_OH)AQ-Aib-EFIE-αMeY- | 935 |
| | LIEGGG-PEG₂₄-K[BEA-MalDap₂-Fc]-NH₂ | |
| 259 | Y-Aib-EGT-αMeF(2F)-TSD-4Pal-Aib-I-αMeL-LDEK(ϵK2-γGlu-C16_OH)AQ-Aib-EFIE-αMeY- | 935 |
| | LIEGGGK(PEG₂₄-BEA-MalDap₂-Fc)-NH₂ | |
| 260 | Y-Aib-EGT-αMeF(2F)-TSD-4Pal-SI-αMeL-LDEK(AEEA2-γGlu-C16_OH)AQ-Aib-EFIE-αMeY- | 935 |
| | LIEGGGGGGGSGGGGSGGGGSK[BEA-MalDap₂-Fc]-NH₂ | |
| 261 | Y-Aib-EGT-αMeF(2F)-TSD-4Pal-SI-αMeL-LDEK(AEEA2-γGlu-C16)AQ-Aib-EFIE-αMeY- | 935 |
| | LIEGGGGGGGSGGGGSGGGGSK[BEA-MalDap₂-Fc]-NH₂ | |
| 262 | Y-Aib-EGT-αMeF(2F)-TSD-4Pal-SI-αMeL-LDEK(AEEA2-γGlu-C18_OH)AQ-Aib-EFIE-αMeY- | 935 |
| | LIEGGGGGGGSGGGGSGGGGSK[BEA-MalDap₂-Fc]-NH₂ (Duplicated from above) | |
| 263 | Y-Aib-EGT-αMeF(2F)-TSD-4Pal-SI-αMeL-LDEK(AEEA2-γGlu-C18_OH)AQ-Aib-EFIe-αMeY- | 936 |
| | LIEGSPSSGAPPPSK((AEEA4-GKAAAEKAAAEKAAAE-[BEAMalDap₂-Fc KRQ]NH₂ | |
| 264 | Y-Aib-EGT-αMeF(2F)-TSDV-Aib-I-αMeL-LD-EK(AEEA2-γGlu-C18_OH)AQ-Aib-EFIe-αMeY- | 936 |
| | LIEGSPSSGAPPPSK(PEG₂₄-BEA-MalDap₂-Fc KRQ)-NH₂ | |
| 265 | Y-Aib-EGT-αMeF(2F)-TSD-4Pal-SI-αMeL-LDEK(AEEA2-γGlu-C18_OH)AQ-Aib-EFIK(PEG₂₄- | 936 |
| | BEA-MalDap₂-Fc KRQ)-αMeY-LIEGSPSSGAPPPSGS-NH₂ | |
| 266 | Y-Aib-EGT-αMeF(2F)-TSD-4Pal-SI-αMeL-LDEK(AEEA2-γGlu-C18_OH)AQ-Aib-EFIK(PEG₂₄- | 936 |
| | BEA-MalDap₂-Fc KRQ)-αMeY-LIEGSPSSGAPPPSGS-NH₂ | |
| 267 | Y-Aib-EGT-αMeF(2F)-TSD-4Pal-SI-αMeL-LDEK(AEEA2-γGlu-C18_OH)AQ-Aib-EFIe-αMeY- | 936 |
| | LIEGGGGGGGSGGGGSGAPAPAPAPAPAPK(BEA-MalDap₂-Fc KRQ)-NH₂ | |
| 268 | Y-Aib-EGT-αMeF(2F)-TSD-4Pal-SI-αMeL-LD-Orn-K(ϵK2-γGlu-C18_OH)AQ-Aib-EFIe-αMeY- | 936 |
| | LIEGSPSSGAPPPS-K(PEG₂₄-BEA-MalDap₂-Fc KRQ)-NH₂ | |
| 269 | Y-Aib-EGT-αMeF(2F)-TSD-V-Aib-I-αMeL-LD-Orn-K(AEEA2-γGlu-C18_OH)AQ-Aib-EFIe-αMeY- | 936 |
| | LIEGGGGGGGSGGGGGGGGSK[BEA-MalDap₂-Fc KRQ]-NH₂ | |
| 270 | Y-Aib-EGT-αMeF(2F)-TSD-4Pal-SI-αMeL-LD-Orn-K(AEEA2-γGlu-C18_OH)AQ-Aib-EFIE-αMeY- | 936 |
| | LIEGGGGGGGSGGGGSGGGGSK[BEA-MalDap₂-Fc KRQ]-NH₂ | |
| 271 | Y-Aib-EGT-αMeF(2F)-TSD-4Pal-SI-αMeL-LDEK(AEEA2-γGlu-C18_OH)AQ-Aib-EFIe-αMeY- | 936 |
| | LIEGGGGGGGSGGGGSGGGGSGAPAPAPAPAPAPK[BEA-MalDap₂-Fc KRQ]-NH₂ | |
| 272 | Y-Aib-EGT-αMeF(2F)-TSD-4Pal-SI-αMeL-LDEK(γGlu-AEEA-ϵK-C20_OH)AQ-Aib-EFIe-αMeY- | 936 |
| | LIEGSPSSGAPPPS-K(PEG₂₄-BEA-MalDap₂-Fc KRQ)-NH₂ | |
| 273 | Y-Aib-EGT-αMeF(2F)-TSD-4Pal-Aib-I-αMeL-LDEK(AEEA2-γGlu-C18_OH)AQ-Aib-EFIE-αMeY- | 936 |
| | LIEGGGGGGGSGGGGSGGGGSGAPAPAPAPAPAPK[BEA-MalDap₂-Fc KRQ]-NH₂ | |
| 274 | Y-Aib-EGT-αMeF(2F)-TSD-4Pal-Aib-I-αMeL-LDEK(AEEA2-γGlu-C18_OH)AQ-Aib-EFIE-αMeY- | 936 |
| | LIEGGGGGGGSGGGGGGGGSGEAAAKEAAAKEAAAKK[BEA-MalDap₂-Fc KRQ]-NH₂ | |
| 275 | Y-Aib-EGT-αMeF(2F)-TSD-4Pal-SI-αMeL-LEEK(AEEA2-γGlu-C18_OH)AQ-Aib-EFIE-αMeY- | 936 |
| | LIEGGGGGGGSGGGGSGGGGSGAPAPAPAPAPAPK[BEA-MalDap₂-Fc KRQ]-NH₂ | |
| 276 | Y-Aib-EGT-αMeF(2F)-TSD-4Pal-SI-αMeL-LEEK(AEEA2-γGlu-C18_OH)AQ-Aib-EFIE-αMeY- | 936 |
| | LIEGGGGGGGSGEAAAKEAAAKEAAAKK[BEA-MalDap₂-Fc KRQ]-NH₂ | |
| 277 | Y-Aib-EGT-αMeF(2F)-TSD-4Pal-SI-αMeL-LEEK(AEEA2-γGlu-C18_OH)AQ-Aib-EFIE-αMeY- | 936 |
| | LIEGGGGGGGSGGGGSGGGGSGEPEPEPEPEPEPK[BEA-MalDap₂-Fc KRQ]-NH₂ | |
| 278 | Y-Aib-EGT-αMeF(2F)-TSD-4Pal-SI-αMeL-LEEK(AEEA2-γGlu-C18_OH)AQ-Aib-EFIE-αMeY- | 936 |
| | LIEGGGGGGGQGGGGQGGGGQGEPEPEPEPEPEPK[BEA-MalDap₂-Fc KRQ]-NH₂ | |
| 279 | Y-Aib-EGT-αMeF(2F)-TSD-4Pal-SI-αMeL-LE-Orn-K(AEEA2-γGlu-C18_OH)AQ-Aib-EFIE-αMeY- | 936 |
| | LIEGGGGGGGSGEPEPEPEPEPEPK[BEA-MalDap₂-Fc KRQ]-NH₂ | |
| 280 | Y-Aib-EGT-αMeF(2F)-TSD-4Pal-SI-αMeL-LE-Orn-K(AEEA2-γGlu-C18_OH)AQ-Aib-EFIE-αMeY- | 936 |
| | LIEGGGGGGGSGGGGSGGGGSGEPEPEPEPEPEPK[BEA-MalDap₂-Fc KRQ]-NH₂ | |
| 281 | Y-Aib-EGT-αMeF(2F)-TSD-4Pal-SI-αMeL-LE-Orn-K(AEEA2-γGlu-C18_OH)AQ-Aib-EFIE-αMeY- | 936 |
| | LIEGSPSSGAPPPS-K(AEEA6-GPAPAPAPAPAPA-[BEAMalDap₂-Fc KRQ]-NH₂ | |
| 282 | Y-Aib-EGT-αMeF(2F)-TSD-4Pal-Aib-I-αMeL-LD-Orn-K(AEEA2-γGlu-C18_OH)AQ-Aib-EFIE- | 936 |
| | αMeY-LIEGGGGGGGSGGGGSGAPAPAPAPAPAPK[BEA-MalDap₂-Fc KRQ]-NH₂ | |
| 283 | Y-Aib-EGT-αMeF(2F)-TSD-4Pal-SI-αMeL-LE-Orn-K(AEEA2-γGlu-C18_OH)AQ-Aib-EFIE-αMeY- | 936 |
| | LIEGGGGGGGSGGGGSGAPAPAPAPAPAPK[BEA-MalDap₂-Fc KRQ]-NH₂ | |
| 284 | Y-Aib-EGT-αMeF(2F)-TSD-4Pal-Aib-I-αMeL-LD-Orn-K(AEEA2-γGlu-C18_OH)AQ-Aib-EFIe- | 936 |
| | αMeY-LIEGGGGGGGSGGGGSGAPAPAPAPAPAPK[BEA-MalDap₂-Fc KRQ]-NH₂ | |
| 285 | Y-Aib-EGT-αMeF(2F)-TSD-4Pal-SI-αMeL-LD-Orn-K(AEEA2-γGlu-C18_OH)AQ-Aib- | 936 |
| | EFIKGGGGSGGGGSGAPAPAPAPAPAPG-[BEA-MalDap)₂-Fc KRQ]-αMeY-LIEGSPSSGAPPPSGS- | |
| | NH₂ | |
| 286 | Y-Aib-EGT-αMeF(2F)-TSD-4Pal-Aib-I-αMeL-LD-Orn-K(AEEA2-γGlu-C18_OH)AQ-Aib- | 936 |
| | EFIK(GGGGSGGGGSGAPAPAPAPAPAPG-BEA-MalDap₂-Fc KRQ)-αMeY-LIEGSPSSGAPPPSGS- | |
| | NH₂ | |
| 287 | Y-Aib-EGT-αMeF(2F)-TSD-4Pal-Aib-I-αMeL-LD-Orn-K(ϵK2-γGlu-C18_OH)AQ-Aib-EFIE- | 936 |
| | αMeY-LIEGGPSSGK(PEG₂₄-BEA-MalDap₂-Fc KRQ)-NH₂ | |
| 288 | Y-Aib-EGT-αMeF(2F)-TSD-4Pal-Aib-I-αMeL-LD-Orn-K(AEEA2-γGlu-C18_OH)AQ-Aib-EFIE- | 936 |
| | αMeY-LIEGGPSSGK(PEG₂₄-BEA-MalDap₂-Fc KRQ)-NH₂ | |
| 289 | Y-Aib-EGT-αMeF(2F)-TSD-4Pal-Aib-I-αMeL-LD-Orn-K(AEEA2-γGlu-C18_OH)AQ-Aib-EFIE- | 936 |
| | αMeY-LIEGGG-PEG₂₄-K[BEA-MalDap₂-Fc KRQ]-NH₂ | |
| 290 | Y-Aib-EGT-αMeF(2F)-TSD-4Pal-Aib-I-αMeL-LD-Orn-K(AEEA2-γGlu-C16_OH)AQ-Aib-EFIE- | 936 |
| | αMeY-LIEGGGGGGGSGGGGSGGGGSK[BEA-MalDap₂-Fc KRQ]-NH₂ | |
| 291 | Y-Aib-EGT-αMeF(2F)-TSD-4Pal-Aib-I-αMeL-LD-Orn-K(AEEA2-γGlu-C18_OH)AQ-Aib-EFIE- | 936 |
| | αMeY-LIEGSPSSGAPPPSK(PEG₂₄-BEA-MalDap₂-Fc KRQ)-NH₂ | |
| 292 | Y-Aib-EGT-αMeF(2F)-TSD-4Pal-Aib-I-αMeL-LD-Orn-K(ϵK2-γGlu-C18_OH)AQ-Aib-EFIE- | 936 |
| | αMeY-LIEGSPSSGAPPPSK[PEG₂₄-BEA-MalDap₂-Fc KRQ]-NH₂ | |
| 293 | Y-Aib-EGT-αMeF(2F)-TSD-4Pal-Aib-I-αMeL-LDEK(ϵK2-γGlu-C18_OH)AQ-Aib-EFIE-αMeY- | 936 |
| | LIEGSPSSGAPPPSK[PEG₂₄-BEA-MalDap₂-Fc KRQ]-NH₂ | |
| 294 | Y-Aib-EGT-αMeF(2F)-TSD-4Pal-Aib-I-αMeL-LD-Orn-K(AEEA2-γGlu-C18_OH)AQ-Aib-EFIE- | 936 |
| | αMeY-LIEGGPSSGAPPPSK[PEG₂₄-BEA-MalDap₂-Fc KRQ]-NH₂ | |
| 295 | Y-Aib-EGT-αMeF(2F)-TSD-4Pal-Aib-I-αMeL-LD-Orn-K(ϵK2-γGlu-C18_OH)AQ-Aib-EFIE- | 936 |
| | αMeY-LIEGGPSSGAPPPSK(PEG₂₄-BEA-MalDap₂-Fc KRQ)-NH₂ | |
| 296 | Y-Aib-EGT-αMeF(2F)-TSD-4Pal-Aib-I-αMeL-LDEK(ϵK2-γGlu-C18_OH)AQ-Aib-EFIE-αMeY- | 936 |
| | LIEGGPSSGAPPPSK(PEG₂₄-BEA-MalDap₂-Fc KRQ)-NH₂ | |
| 297 | Y-Aib-EGT-αMeF(2F)-TSD-4Pal-Aib-I-αMeL-LD-Orn-K(ϵK2-γGlu-C18_OH)AQ-Aib-EFIe- | 936 |
| | αMeY-LIEGSPSSGAPPPSK(PEG₂₄-BEA-MalDap₂ Fc KRQ)-NH₂ | |
| 298 | Y-Aib-EGT-αMeF(2F)-TSD-4Pal-Aib-I-αMeL-LD-Orn-K(ϵK2-γGlu-C18_OH)AQ-Aib-EFIe- | 936 |
| | αMeY-LIEGGGK(PEG₂₄-BEA-MalDap₂ Fc KRQ)-NH₂ | |
| 299 | Y-Aib-EGT-αMeF(2F)-TSD-4Pal-Aib-I-αMeL-LD-Orn-K(ϵK2-γGlu-C18_OH)AQ-Aib-EFIE- | 936 |
| | αMeY-LIEGG-Orn-SSGAPPPSK(PEG₂₄-BEA-MalDap₂ Fc KRQ)-NH₂ | |
| 300 | Y-Aib-EGT-αMeF(2F)-TSD-4Pal-Aib-I-αMeL-LD-Orn-K(AEEA2-γGlu-C18_OH)AQ-Aib-EFIE- | 936 |
| | αMeY-LIEGG-Orn-SSGAPPPSK(PEG₂₄-BEA-MalDap₂ Fc KRQ)-NH₂ | |
| 301 | Y-Aib-EGT-αMeF(2F)-TSD-4Pal-Aib-I-αMeL-LD-Orn-K(ϵK2-γGlu-C18_OH)AQ-Aib-EFIE- | 936 |
| | αMeY-LIEGG-Orn-K(PEG₂₄-BEA-MalDap₂ Fc KRQ)-NH₂ | |
| 302 | Y-Aib-EGT-αMeF(2F)-TSD-4Pal-Aib-I-αMeL-LD-Orn-K(AEEA2-γGlu-C18_OH)AQ-Aib-EFIE- | 936 |
| | αMeY-LIEGG-Orn-K(PEG₂₄-BEA-MalDap₂ Fc KRQ)-NH₂ | |
| 303 | Y-Aib-EGT-αMeF(2F)-TSD-4Pal-Aib-I-αMeL-LD-Orn-K(ϵK2-γGlu-C18_OH)AQ-Aib-Orn-FIE- | 936 |
| | αMeY-LIEGSPSSGAPPPSK(PEG₂₄-BEA-MalDap₂ Fc KRQ)-NH₂ | |
| 304 | Y-Aib-EGT-αMeF(2F)-TSD-4Pal-Aib-I-αMeL-LD-Orn-K(AEEA2-γGlu-C18_OH)AQ-Aib-Orn- | 936 |
| | FIE-αMeY-LIEGSPSSGAPPPSK(PEG₂₄-BEA-MalDap₂ Fc KRQ)-NH₂ | |
| 305 | Y-Aib-EGT-αMeF(2F)-TSD-4Pal-Aib-I-αMeL-LD-Orn-K(AEEA2-γGlu-C18_OH)AQ-Aib-EFIQ- | 936 |
| | αMeY-LIEGSPSSGAPPPSK(PEG₂₄-BEA-MalDap₂ Fc KRQ)-NH₂ | |
| 306 | Y-Aib-EGT-αMeF(2F)-TSD-4Pal-Aib-I-αMeL-LD-Orn-K(ϵK2-γGlu-C18_OH)AQ-Aib-EFIQ- | 936 |
| | αMeY-LIEGSPSSGAPPPSK(PEG₂₄-BEA-MalDap₂ Fc KRQ)-NH₂ | |
| 307 | Y-Aib-EGT-αMeF(2F)-TSD-4Pal-Aib-I-αMeL-LD-Orn-K(AEEA2-γGlu-C18_OH)AQ-Aib-EFIE- | 936 |
| | αMeY-LIEGSPSSGAPPPSK(AEEA6-GPAPAPAPAPAPA-BEA-MalDap₂-Fc KRQ)-NH₂ | |
| 308 | Y-Aib-EGT-αMeF(2F)-TSD-4Pal-SI-αMeL-LD-Orn-K(AEEA2-γGlu-C18_OH)AQ-Aib-EFIE-αMeY- | 936 |
| | LIEGSPSSGAPPPSK(AEEA6-GPAPAPAPAPAPA-BEA-MalDap₂-Fc KRQ)-NH₂ | |
| 309 | Y-Aib-EGT-αMeF(2F)-TSD-4Pal-SI-αMeL-LD-Orn-K(ϵK2-γGlu-C18 OH)AQ-Aib-EFIE-αMeY- | 936 |
| | LIEGSPSSGAPPPSK(AEEA6-GPAPAPAPAPAPA-BEA-MalDap₂ Fc KRQ)-NH₂ | |
| 310 | Y-Aib-EGT-αMeF(2F)-TSD-4Pal-SI-αMeL-LD-Orn-K(ϵK2-γGlu-C18_OH)AQ-Aib-EFIe-αMeY- | 936 |
| | LIEGSPSSGAPPPSK(AEEA6-GPAPAPAPAPAPA-BEA-MalDap₂-Fc KRQ)-NH₂ | |
| 311 | Y-Aib-EGT-αMeF(2F)-TSD-4Pal-Aib-I-αMeL-LD-Orn-K(AEEA2-γGlu-C18_OH)AQ-Aib-EFIE- | 936 |
| | αMeY-LIEGSPSSGAPPPSK(AEEA6-BEA-MalDap₂-Fc KRQ)-NH₂ | |
| 312 | Y-Aib-EGT-αMeF(2F)-TSD-4Pal-SI-αMeL-LD-Orn-K(ϵK2-γGlu-C18_OH)AQ-Aib-EFIe-αMeY- | 941 |
| | LIEGSPSSGAPPPSK(PEG₂₄-BEA-MalDap₂-Fc IG KRQ)-NH₂ | |
| 313 | Y-Aib-EGT-αMeF(2F)-TSD-4Pal-SI-αMeL-LE-Orn-K(AEEA2-γGlu-C18_OH)AQ-Aib-EFIE-αMeY- | 941 |
| | LIEGGGGGGGSGGGGSGAPAPAPAPAPAPK[BEA-MalDap₂-Fc IG KRQ]-NH₂ | |
| 314 | Y-Aib-EGT-αMeF(2F)-TSD-4Pal-Aib-I-αMeL-LD-Orn-K(AEEA2-γGlu-C18_OH)AQ-Aib-EFIQ- | 941 |
| | αMeY-LIEGSPSSGAPPPSK(PEG₂₄-BEA-MalDap₂ Fc IG KRQ)-NH₂ | |
| 315 | Y-Aib-EGT-αMeF(2F)-TSD-4Pal-Aib-I-αMeL-LD-Orn-K(ϵK2-γGlu-C18_OH)AQ-Aib-EFIQ- | 936 |
| | αMeY-LIEGSPSSGAPPPSK(PEG₂₄-BEA-MalDap₂ Fc KRQ)-NH₂ | |
| 316 | Y-Aib-EGT-αMeF(2F)-TSD-4Pal-Aib-I-αMeL-LD-Orn-K(AEEA2-γGlu-C18_OH)AQ-Aib-EFIE- | 941 |
| | αMeY-LIEGSPSSGAPPPSK(AEEA6-BEA-MalDap₂-Fc IG KRQ)-NH₂ | |
| 317 | Y-Aib-EGT-αMeF(2F)-TSD-4Pal-SI-αMeL-LD-Orn-K(AEEA2-γGlu-C18_OH)AQ-Aib-EFIQ-αMeY- | 941 |
| | LIEGSPSSGAPPPSK(PEG₂₄-BEA-MalDap₂-Fc IG KRQ)-NH₂ | |
| 318 | Y-Aib-EGT-αMeF(2F)-TSDY-Aib-I-αMeL-LD-Orn-K(AEEA2-γGlu-C18_OH)AQ-Aib-EFIe-αMeY- | 941 |
| | LIEGSPSSGAPPPSK(PEG₂₄-BEA-MalDap₂-Fc IG KRQ)-NH₂ | |
| 319 | Y-Aib-EGT-αMeF(2F)-TSDY-Aib-I-αMeL-LD-Orn-K(AEEA2-γGlu-C18_OH)AQ-Aib-EFIE-αMeY- | 935 |
| | LIEGSPSSGAPPPSK[PEG₂₄-BEA-MalDap₂-Fc]-NH₂ | |
| 320 | Y-Aib-EGT-αMeF(2F)-TSD-4Pal-Aib-I-αMeL-LD-Orn-K(AEEA2-γGlu-C18_OH)AQ-Aib-EFIQ- | 941 |
| | αMeY-LIE-Aib-SPSSGAPPPSK(PEG₂₄-BEA-MalDap₂-Fc IG KRQ)-NH₂ | |
| 321 | Y-Aib-EGT-αMeF(2F)-TSD-4Pal-Aib-I-αMeL-LD-Orn-K(ϵK2-γGlu-C18_OH)AQ-Aib-EFIQ- | 941 |
| | αMeY-LIE-Aib-SPSSGAPPPSK(PEG₂₄-BEA-MalDap₂-Fc IG KRQ)-NH₂ | |
| 322 | Y-Aib-EGT-αMeF(2F)-TSD-4Pal-SI-αMeL-LD-Orn-K(AEEA2-γGlu-C18_OH)AQ-Aib-EFIQ-αMeY- | 941 |
| | LIEGSPSSGAPPPSK(AEEA6-GPAPAPAPAPAPA-BEA-MalDap₂-Fc IG KRQ)-NH₂ | |
| 323 | Y-Aib-EGT-αMeF(2F)-TSD-4Pal-SI-αMeL-LD-Orn-K(ϵK2-γGlu-C18_OH)AQ-Aib-EFIQ-αMeY- | 941 |
| | LIEGSPSSGAPPPSK(AEEA6-GPAPAPAPAPAPA-BEA-MalDap₂-Fc IG KRQ)-NH₂ | |
| 324 | Y-Aib-EGT-αMeF(2F)-TSD-4Pal-SI-αMeL-LD-Orn-K(AEEA2-γGlu-C18_OH)AQ-Aib-EFIQ-αMeY- | 941 |
| | LIEGSPSSGAPPPSK(PEG₂₄-BEA-MalDap₂-Fc IG KRQ)-NH₂ | |
| 325 | Y-Aib-EGT-αMeF(2F)-TSD-4Pal-SI-αMeL-LD-Orn-K(ϵK2-γGlu-C18_OH)AQ-Aib-EFIQ-αMeY- | 941 |
| | LIEGSPSSGAPPPSK(PEG₂₄-BEA-MalDap₂-Fc IG KRQ)-NH₂ | |
| 326 | Y-Aib-EGT-αMeF(2F)-TSD-4Pal-SI-αMeL-LD-Orn-K(AEEA2-γGlu-C18_OH)AQ-Aib-EFIQ-αMeY- | 941 |
| | LIEGSPSSGAPPPSK(AEEA6-BEA-MalDap₂-Fc IG KRQ)-NH₂ | |
| 327 | Y-Aib-EGT-αMeF(2F)-TSD-4Pal-SI-αMeL-LD-Orn-K(ϵK2-γGlu-C18_OH)AQ-Aib-EFIQ-αMeY- | 941 |
| | LIEGSPSSGAPPPSK(AEEA6-BEA-MalDap₂-Fc IG KRQ)-NH₂ | |
| 328 | Y-Aib-EGT-αMeF(2F)-TSD-4Pal-SI-αMeL-LD-Orn-K(ϵK2-γGlu-C18_OH)AQ-Aib-EFIe-αMeY- | 942 |
| | LIEGSPSSGAPPPS-K(PEG₂₄-BEA-MalDap₂-Fc N-Cys)-NH₂ | |
| 329 | Y-Aib-EGT-αMeF(2F)-TSD-4Pal-SI-αMeL-LD-Orn-K(ϵK2-γGlu-C18_OH)AQ-Aib-EFIe-αMeY- | 942 |
| | LIEGSPSSGAPPPS-K(PEG₂₄-BEA-MalDap₂-Fc N-Cys KRQ)-NH₂ | |
| 330 | Y-Aib-EGT-αMeF(2F)-TSD-4Pal-Aib-I-αMeL-LD-Orn-K(AEEA2-γGlu-C18_OH)AQ-Aib-EFIe- | 935 |
| | αMeY-LIEGGGGGGGSGGGGSGAPAPAPAPAPAPK[BEA-MalDap₂-Fc KRQ]-NH₂ | |
| 331 | Y-Aib-EGT-αMeF(2F)-TSD-4Pal-SI-αMeL-LD-Orn-K(ϵK2-γGlu-C18_OH)AQ-Aib-EFIe-αMeY- | 935 |
| | LIEGSPSSGAPPPS-K(PEG₂₄-BEA-MalDap₂-Fc KRQ)-NH₂ | |
| 332 | Y-Aib-QGT-αMeF(2F)-TSD-4Pal-SI-αMeL-LD-Orn-K(AEEA2-γGlu-C18_OH)AQ-αMe4Pal-Orn- | 935 |
| | FIe-αMeY-LIEGSPSSGAPPPSK[PEG₂₄-BEA-MalDap₂-Fc]-NH₂ | |
| 333 | Y-Aib-QGT-αMeF(2F)-TSD-4Pal-SI-αMeL-LD-Orn-K(AEEA2-γGlu-C18_OH)AQ-αMe4Pal-Orn- | 935 |
| | FIE-αMeY-LIEGSPSSGAPPPSK[PEG₂₄-BEA-MalDap₂-Fc]-NH₂ | |
| 334 | Y-Aib-QGT-αMeF(2F)-TSD-4Pal-αMeS-I-αMeL-LD-Orn-K(AEEA2-γGlu-C18_OH)AQ-αMe4Pal- | 935 |
| | Orn-FIe-αMeY-LIEGSPSSGAPPPSK[PEG₂₄-BEA-MalDap₂-Fc]-NH₂ | |
| 335 | Y-Aib-QGT-αMeF(2F)-TSD-4Pal-αMeS-I-αMeL-LD-Orn-K(AEEA2-γGlu-C18_OH)AQ-αMe4Pal- | 935 |
| | Orn-FIE-αMeY-LIEGSPSSGAPPPSK[PEG₂₄-BEA-MalDap₂-Fc]-NH₂ | |
| 336 | Y-Aib-QGT-αMeF(2F)-TSDY-αMeS-I-αMeL-LD-Orn-K(AEEA2-γGlu-C18_OH)AQ-αMe4Pal-Orn- | 935 |
| | FIe-αMeY-LIEGSPSSGAPPPSK[PEG₂₄-BEA-MalDap₂-Fc]-NH₂ | |
| 337 | Y-Aib-QGT-αMeF(2F)-TSDY-αMeS-I-αMeL-LD-Orn-K(AEEA2-γGlu-C18_OH)AQ-αMe4Pal-Orn- | 935 |
| | FIE-αMeY-LIEGSPSSGAPPPSK[PEG₂₄-BEA-MalDap₂-Fc]-NH₂ | |
| 338 | Y-Aib-QGT-αMeF(2F)-TSD-4Pal-αMeS-I-αMeL-LD-Orn-K(AEEA2-γGlu-C18_OH)AQ-αMe4Pal- | 935 |
| | Orn-FIE-αMeY-LIEGGGGGGGSGGGGSGAPAPAPAPAPAPK[BEA-MalDap₂-Fc]-NH₂ | |
| 339 | Y-Aib-QGT-αMeF(2F)-TSDY-αMeS-I-αMeL-LD-Orn-K(AEEA2-γGlu-C18_OH)AQ-αMe4Pal-Orn- | 935 |
| | FIe-αMeY-LIEGGGGGGGSGGGGSGAPAPAPAPAPAPK[BEA-MalDap₂-Fc]-NH₂ | |
| 340 | Y-Aib-QGT-αMeF(2F)-TSD-4Pal-αMeS-I-αMeL-LD-Orn-K(AEEA2-γGlu-C18_OH)AQ-αMe4Pal- | 935 |
| | Orn-FIE-αMeY-LIEGGPSSGAPPPSGK[PEG₂₄-BEA-MalDap₂-Fc]-NH₂ | |
| 341 | Y-Aib-QGT-αMeF(2F)-TSDY-αMeS-I-αMeL-LD-Orn-K(AEEA2-γGlu-C18_OH)AQ-αMe4Pal-Orn- | 935 |
| | FIe-αMeY-LIEGGPSSGAPPPSGK[PEG₂₄-BEA-MalDap₂-Fc]-NH₂ | |
| 342 | Y-Aib-QGT-αMeF(2F)-TSD-4Pal-αMeS-I-αMeL-LD-Orn-K(ϵK2-γGlu-C18_OH)AQ-αMe4Pal-Orn- | 935 |
| | FIE-αMeY-LIEGGPSSGAPPPSGK[PEG₂₄-BEA-MalDap₂-Fc]-NH₂ | |
| 343 | Y-Aib-QGT-αMeF(2F)-TSDY-αMeS-I-αMeL-LD-Orn-K(ϵK2-γGlu-C18_OH)AQ-αMe4Pal-Orn-FIe- | 935 |
| | αMeY-LIEGGPSSGAPPPSGK[PEG₂₄-BEA-MalDap₂-Fc]-NH₂ | |
| 344 | Y-Aib-QGT-αMeF(2F)-TSD-4Pal-αMeS-I-αMeL-LD-Orn-K(AEEA2-γGlu-C18_OH)AQ-αMe4Pal- | 935 |
| | Orn-FIK[PEG₂₄-BEA-MalDap₂-Fc]-αMeY-LIEGGPSSGAPPPSGG-NH₂ | |
| 345 | Y-Aib-QGT-αMeF(2F)-TSDY-αMeS-I-αMeL-LD-Orn-K(AEEA2-γGlu-C18_OH)AQ-αMe4Pal-Orn- | 935 |
| | FIK[PEG₂₄-BEA-MalDap₂-Fc]-αMeY-LIEGGPSSGAPPPSGG-NH₂ | |
| 346 | Y-Aib-QGT-αMeF(2F)-TSD-4Pal-αMeS-I-αMeL-LD-Orn-K(ϵK2-γGlu-C18_OH)AQ-αMe4Pal-Orn- | 935 |
| | FIK[PEG₂₄-BEA-MalDap₂-Fc]-αMeY-LIEGGPSSGAPPPSGG-NH₂ | |
| 347 | Y-Aib-QGT-αMeF(2F)-TSDY-αMeS-I-αMeL-LD-Orn-K(ϵK2-γGlu-C18_OH)AQ-αMe4Pal-Orn- | 935 |
| | FIK[PEG₂₄-BEA-MalDap₂-Fc]-αMeY-LIEGGPSSGAPPPSGG-NH₂ | |
| 348 | Y-Aib-QGT-αMeF(2F)-TSD-4Pal-αMeS-I-αMeL-LD-Orn-K(AEEA2-γGlu-C18_OH)AQ-αMe4Pal- | 935 |
| | Orn-FIE-αMeY-LIEGGPSSGK[PEG₂₄-BEA-MalDap₂-Fc]-NH₂ | |
| 349 | Y-Aib-QGT-αMeF(2F)-TSDY-αMeS-I-αMeL-LD-Orn-K(AEEA2-γGlu-C18_OH)AQ-αMe4Pal-Orn- | 935 |
| | FIe-αMeY-LIEGGPSSGK[PEG₂₄-BEA-MalDap₂-Fc]-NH₂ | |
| 350 | Y-Aib-QGT-αMeF(2F)-TSD-4Pal-αMeS-I-αMeL-LD-Orn-K(ϵK2-γGlu-C18_OH)AQ-αMe4Pal- | 935 |
| | Orn-FIE-αMeY-LIEGGPSSGK[PEG₂₄-BEA-MalDap₂-Fc]-NH₂ | |
| 351 | Y-Aib-QGT-αMeF(2F)-TSDY-αMeS-I-αMeL-LD-Orn-K(ϵK2-γGlu-C18_OH)AQ-αMe4Pal-Orn- | 935 |
| | FIe-αMeY-LIEGGPSSGK[PEG₂₄-BEA-MalDap₂-Fc]-NH₂ | |
| 352 | Y-Aib-QGT-αMeF(2F)-TSD-4Pal-αMeS-I-αMeL-LD-Orn-K(AEEA2-γGlu-C18_OH)AQ-αMe4Pal- | 935 |
| | Orn-FIE-αMeY-LIEGGGK[PEG₂₄-BEA-MalDap₂-Fc]-NH₂ | |
| 353 | Y-Aib-QGT-αMeF(2F)-TSDY-αMeS-I-αMeL-LD-Orn-K(AEEA2-γGlu-C18_OH)AQ-αMe4Pal-Orn- | 935 |
| | FIe-αMeY-LIEGGGK[PEG₂₄-BEA-MalDap₂-Fc]-NH₂ | |
| 354 | Y-Aib-QGT-αMeF(2F)-TSD-4Pal-αMeS-I-αMeL-LD-Orn-K(ϵK2-γGlu-C18_OH)AQ-αMe4Pal-Orn- | 935 |
| | FIE-αMeY-LIEGGGK[PEG₂₄-BEA-MalDap₂-Fc]-NH₂ | |
| 355 | Y-Aib-QGT-αMeF(2F)-TSDY-αMeS-I-αMeL-LD-Orn-K(ϵK2-γGlu-C18_OH)AQ-αMe4Pal-Orn-FIe- | 935 |
| | αMeY-LIEGGGK[PEG₂₄-BEA-MalDap₂-Fc]-NH₂ | |
| 356 | Y-Aib-QGT-αMeF(2F)-TSD-4Pal-αMeS-I-αMeL-LD-Orn-K(AEEA2-γGlu-C18_OH)AQ-αMe4Pal- | 935 |
| | Orn-FIE-αMeY-LIEGGGGGGGQGGGGQGGGGQK[BEA-MalDap₂-Fc]-NH₂ | |
| 357 | Y-Aib-QGT-αMeF(2F)-TSDY-αMeS-I-αMeL-LD-Orn-K(AEEA2-γGlu-C18_OH)AQ-αMe4Pal-Orn- | 935 |
| | FIe-αMeY-LIEGGGGGGGQGGGGQGGGGQK[BEA-MalDap₂-Fc]-NH₂ | |
| 358 | Y-Aib-QGT-αMeF(2F)-TSD-4Pal-αMeS-I-αMeL-LD-Orn-K(ϵK2-γGlu-C18_OH)AQ-αMe4Pal-Orn- | 935 |
| | FIE-αMeY-LIEGSPSSGAPPPSK(PEG₂₄-BEA-MalDap₂ Fc)-NH₂ | |
| 359 | Y-Aib-QGT-αMeF(2F)-TSDY-αMeS-I-αMeL-LD-Orn-K(ϵK2-γGlu-C18_OH)AQ-αMe4Pal-Orn-FIe- | 935 |
| | αMeY-LIEGSPSSGAPPPSK(PEG₂₄-BEA-MalDap₂ Fc)-NH₂ | |
| 360 | Y-Aib-QGT-αMeF(2F)-TSD-4Pal-αMeS-I-αMeL-LD-Orn-K(AEEA2-γGlu-C18_OH)AQ-αMe4Pal- | 935 |
| | Orn-FIe-αMeY-LIEGSPSSGK(PEG₂₄-BEA-MalDap₂ Fc)-NH₂ | |
| 361 | Y-Aib-QGT-αMeF(2F)-TSD-4Pal-αMeS-I-αMeL-LD-Orn-K(AEEA2-γGlu-C18_OH)AQ-αMe4Pal- | 935 |
| | Orn-FIe-αMeY-LIEGGGGGGGSGGGGSGGGGSK(BEA-MalDap₂ Fc)-NH₂ | |
| 362 | Y-Aib-QGT-αMeF(2F)-TSD-4Pal-αMeS-I-αMeL-LD-Orn-K(AEEA2-γGlu-C18_OH)AQ-αMe4Pal- | 935 |
| | Orn-FIe-αMeY-LIEGGGGGGGSGGGGSGAPAPAPAPAPAPK(BEA-MalDap₂ Fc)-NH₂ | |
| 363 | Y-Aib-QGT-αMeF(2F)-TSD-4Pal-αMeS-I-αMeL-LD-Orn-K(AEEA2-γGlu-C18_OH)AQ-αMe4Pal- | 935 |
| | Orn-FIe-αMeY-LIEGGGK[PEG₂₄-BEA-MalDap₂-Fc]-NH₂ | |
| 364 | Y-Aib-QGT-αMeF(2F)-TSD-4Pal-αMeS-I-αMeL-LD-Orn-K(ϵK2-γGlu-C18_OH)AQ-αMe4Pal-Orn- | 935 |
| | FIe-αMeY-LIEGSPSSGAPPPSK[PEG₂₄-BEA-MalDap₂-Fc]-NH₂ | |
| 365 | Y-Aib-QGT-αMeF(2F)-TSD-4Pal-αMeS-I-αMeL-LD-Orn-K(AEEA2-γGlu-C18_OH)AQ-αMe4Pal- | 935 |
| | Orn-FIQ-αMeY-LIEGSPSSGAPPPSK[PEG₂₄-BEA-MalDap₂-Fc]-NH₂ | |
| 366 | Y-Aib-QGT-αMeF(2F)-TSD-4Pal-αMeS-I-αMeL-LD-Orn-K(ϵK2-γGlu-C18_OH)AQ-αMe4Pal-Orn- | 935 |
| | FIQ-αMeY-LIEGSPSSGAPPPSK[PEG₂₄-BEA-MalDap₂-Fc]-NH₂ | |
| 367 | Y-Aib-QGT-αMeF(2F)-TSDY-αMeS-I-αMeL-LD-Orn-K(AEEA2-γGlu-C18_OH)AQ-αMe4Pal-Orn- | 935 |
| | FIQ-αMeY-LIEGSPSSGAPPPSK[PEG₂₄-BEA-MalDap₂-Fc]-NH₂ | |
| 368 | Y-Aib-QGT-αMeF(2F)-TSDY-αMeS-I-αMeL-LD-Orn-K(ϵK2-γGlu-C18_OH)AQ-αMe4Pal-Orn- | 935 |
| | FIQ-αMeY-LIEGSPSSGAPPPSK[PEG₂₄-BEA-MalDap₂-Fc]-NH₂ | |
| 369 | Y-Aib-QGT-αMeF(2F)-TSDY-αMeS-I-αMeL-LD-Orn-K(AEEA2-γGlu-C18_OH)AQ-αMe4Pal-Orn- | 935 |
| | FIe-αMeY-LIEGSPSSGAPPPSK(AEEA6-GPAPAPAPAPAPA-BEA(MalDap₂-Fc)-NH₂ | |
| 370 | Y-Aib-QGT-αMeF(2F)-TSDY-αMeS-I-αMeL-LD-Orn-K(AEEA2-γGlu-C18_OH)AQ-αMe4Pal-Orn- | 935 |
| | FIe-αMeY-LIE-Aib-SPSSGAPPPSK[PEG₂₄-BEA-MalDap₂-Fc]-NH₂ | |
| 371 | Y-Aib-QGT-αMeF(2F)-TSDY-αMeS-I-αMeL-LD-Orn-K(AEEA2-γGlu-C18_OH)AQ-αMe4Pal-EFIe- | 935 |
| | αMeY-LIEGSPSSGAPPPSK[PEG₂₄-BEA-MalDap₂-Fc]-NH₂ | |
| 372 | Y-Aib-QGT-αMeF(2F)-TSDY-αMeS-I-αMeL-LD-Orn-K(AEEA2-γGlu-C18_OH)AQ-αMe4Pal-EFIQ- | 935 |
| | αMeY-LIEGSPSSGAPPPSK[PEG₂₄-BEA-MalDap₂-Fc]-NH₂ | |
| 373 | Y-Aib-QGT-αMeF(2F)-TSDY-αMeS-I-αMeL-LD-Orn-K(AEEA2-γGlu-C18_OH)AQ-Aib-EFIQ-αMeY- | 935 |
| | LIEGSPSSGAPPPSK[PEG₂₄-BEA-MalDap₂-Fc]-NH₂ | |
| 374 | Y-Aib-QGT-αMeF(2F)-TSDY-αMeS-I-αMeL-LD-Orn-K(AEEA2-γGlu-C18_OH)AQ-αMe4Pal-EFIQ- | 935 |
| | αMeY-LLEGSPSSGAPPPSK[PEG₂₄-BEA-MalDap₂-Fc]-NH₂ | |
| 375 | Y-Aib-QGT-αMeF(2F)-TSDY-αMeS-I-αMeL-LD-Orn-K(AEEA2-γGlu-C18_OH)AQ-αMe4Pal-Orn- | 935 |
| | FIe-αMeY-LIEGGGGGGGSGGGGSGGGGSK[BEA-MalDap₂-Fc]-NH₂ | |
| 376 | Y-Aib-QGT-αMeF(2F)-TSD-4Pal-SI-αMeL-LD-Orn-K(AEEA2-γGlu-C18_OH)AQ-αMe4Pal-Orn- | 935 |
| | FIQ-αMeY-LIEGSPSSGAPPPSK[PEG₂₄-BEA-MalDap₂-Fc]-NH₂ | |
| 377 | Y-Aib-QGT-αMeF(2F)-TSDY-αMeS-I-αMeL-LD-Orn-K(AEEA2-γGlu-C18_OH)AQ-αMe4Pal-Orn- | 935 |
| | FIe-αMeY-LIE-Aib-GGGGGGSGGGGSGGGGSK[BEA-MalDap₂-Fc]-NH₂ | |
| 378 | Y-Aib-QaT-αMeF(2F)-TSDY-αMeS-I-αMeL-LD-Orn-K(AEEA2-γGlu-C18_OH)AQ-αMe4Pal-EFIQ- | 935 |
| | αMeY-LIEGSPSSGAPPPSK[PEG₂₄-BEA-MalDap₂-Fc]-NH₂ | |
| 379 | Y-αMeS-QGT-αMeF(2F)-TSDY-αMeS-I-αMeL-LD-Orn-K(AEEA2-γGlu-C18_OH)AQ-αMe4Pal-EFIQ- | 935 |
| | αMeY-LIEGSPSSGAPPPSK[PEG₂₄-BEA-MalDap₂-Fc]-NH₂ | |
| 380 | Y-Iva-QGT-αMeF(2F)-TSDY-αMeS-I-αMeL-LD-Orn-K(AEEA2-γGlu-C18_OH)AQ-αMe4Pal-EFIQ- | 935 |
| | αMeY-LIEGSPSSGAPPPSK[PEG₂₄-BEA-MalDap₂-Fc]-NH₂ | |
| 381 | Y-Aib-HGT-αMeF(2F)-TSDY-αMeS-I-αMeL-LD-Orn-K(AEEA2-γGlu-C18_OH)AQ-αMe4Pal-EFIQ- | 935 |
| | αMeY-LIEGSPSSGAPPPSK[PEG₂₄-BEA-MalDap₂-Fc]-NH₂ | |
| 382 | H-Aib-HGT-αMeF(2F)-TSDY-αMeS-I-αMeL-LD-Orn-K(AEEA2-γGlu-C18_OH)AQ-αMe4Pal-EFIQ- | 935 |
| | αMeY-LIEGSPSSGAPPPSK[PEG₂₄-BEA-MalDap₂-Fc]-NH₂ | |
| 383 | H-Aib-HGT-αMeF(2F)-TSDY-αMeS-I-αMeL-LD-Orn-K(AEEA2-γGlu-C18_OH)AQ-Aib-EFIQ-αMeY- | 935 |
| | LIEGSPSSGAPPPSK[PEG₂₄-BEA-MalDap₂-Fc]-NH₂ | |
| 384 | H-Aib-HGT-αMeF(2F)-TSD-4Pal-αMeS-I-αMeL-LD-Orn-K(AEEA2-γGlu-C18_OH)AQ-αMe4Pal- | 935 |
| | EFIQ-αMeY-LIEGSPSSGAPPPSK[PEG₂₄-BEA-MalDap₂-Fc]-NH₂ | |
| 385 | H-Aib-HGT-αMeF(2F)-TSD-4Pal-SI-αMeL-LD-Orn-K(AEEA2-γGlu-C18_OH)AQ-αMe4Pal-EFIQ- | 935 |
| | αMeY-LIEGSPSSGAPPPSK[PEG₂₄-BEA-MalDap₂-Fc]-NH₂ | |
| 386 | Y-Aib-QGT-αMeF(2F)-TSDY-αMeS-I-αMeL-LD-Orn-K(AEEA2-γGlu-C18_OH)AQ-αMe4Pal-EFIQ- | 935 |
| | αMeY-LIE-Aib-SPSSGAPPPSK[PEG₂₄-BEA-MalDap₂-Fc]-NH₂ | |
| 387 | Y-Aib-QGT-αMeF(2F)-TSDY-αMeS-I-αMeL-LD-Orn-K(AEEA2-γGlu-C18_OH)AQ-αMe4Pal-EFIE- | 935 |
| | αMeY-LIEGSPSSGAPPPSK[PEG₂₄-BEA-MalDap₂-Fc]-NH₂ | |
| 388 | Y-Aib-QGT-αMeF(2F)-TSD-4Pal-αMeS-I-αMeL-LD-Orn-K(AEEA2-γGlu-C18_OH)AQ-αMe4Pal- | 935 |
| | EFIQ-αMeY-LIEGSPSSGAPPPSK[PEG₂₄-BEA-MalDap₂-Fc]-NH₂ | |
| 389 | Y-Aib-QGT-αMeF(2F)-TSD-4Pal-αMeS-I-αMeL-LD-Orn-K(AEEA2-γGlu-C18_OH)AQ-αMe4Pal- | 935 |
| | EFIE-αMeY-LIEGSPSSGAPPPSK[PEG₂₄-BEA-MalDap₂-Fc]-NH₂ | |
| 390 | Y-Aib-QGT-αMeF(2F)-TSDY-αMeS-I-αMeL-LD-Orn-K(AEEA-γGlu-C18_OH)AQ-αMe4Pal-EFIQ- | 935 |
| | αMeY-LIEGSPSSGAPPPSK[PEG₂₄-BEA-MalDap₂-Fc]-NH₂ | |
| 391 | Y-Aib-QGT-αMeF(2F)-TSDY-αMeS-I-αMeL-LD-Orn-K(AEEA2-γGlu-C18_OH)AQ-αMe4Pal-EFIE- | 935 |
| | αMeY-LIE-Aib-SPSSGAPPPSK[PEG₂₄-BEA-MalDap₂-Fc]-NH₂ | |
| 392 | Y-Aib-QGT-αMeF(2F)-TSD-4Pal-αMeS-I-αMeL-LD-Orn-K(AEEA2-γGlu-C18_OH)AQ-αMe4Pal- | 935 |
| | EFIQ-αMeY-LIE-Aib-SPSSGAPPPSK[PEG₂₄-BEA-MalDap₂-Fc]-NH₂ | |
| 393 | Y-Aib-QGT-αMeF(2F)-TSD-4Pal-αMeS-I-αMeL-LD-Orn-K(AEEA2-γGlu-C18_OH)AQ-αMe4Pal- | 935 |
| | EFIE-αMeY-LIE-Aib-SPSSGAPPPSK[PEG₂₄-BEA-MalDap₂-Fc]-NH₂ | |
| 394 | Y-Aib-QGT-αMeF(2F)-TSDY-αMeS-I-αMeL-LD-Orn-K(AEEA-γGlu-C18_OH)AQ-αMe4Pal-EFIQ- | 935 |
| | αMeY-LIE-Aib-SPSSGAPPPSK[PEG₂₄-BEA-MalDap₂-Fc]-NH₂ | |
| 395 | Y-Aib-QGT-αMeF(2F)-TSDY-αMeS-I-αMeL-LDEK(AEEA-γGlu-C18_OH)AQ-αMe4Pal-EFIQ-αMeY- | 935 |
| | LLEGSPSSGAPPPSK[PEG₂₄-BEA-MalDap₂-Fc]-NH₂ | |
| 396 | Y-Aib-QGT-αMeF(2F)-TSDY-αMeS-I-αMeL-LDEK(AEEA-γGlu-C18_OH)AQ-αMe4Pal-EFIQ-αMeY- | 935 |
| | LLE-Aib-SPSSGAPPPSK[PEG₂₄-BEA-MalDap₂-Fc]-NH₂ | |
| 397 | H-Aib-QGT-αMeF(2F)-TSDY-αMeS-I-αMeL-LD-Orn-K(AEEA2-γGlu-C18_OH)AQ-αMe4Pal-EFIQ- | 935 |
| | αMeY-LIEGSPSSGAPPPSK[PEG₂₄-BEA-MalDap₂-Fc]-NH₂ | |
| 398 | Y-Aib-QGT-αMeF(2F)-TSDY-αMeS-I-αMeL-LD-Orn-K(AEEA2-γGlu-C18_OH)AQ-αMe4Pal-EFIQ- | 935 |
| | αMeY-LVEGSPSSGAPPPSK[PEG₂₄-BEA-MalDap₂-Fc]-NH₂ | |
| 399 | Y-Aib-QGT-αMeF(2F)-TSDY-αMeS-I-αMeL-LD-Orn-K(AEEA2-γGlu-C18_OH)AQ-αMe4Pal-EFIQ- | 935 |
| | αMeY-LIEGGGGGGGSGGGGSGGGGSK[BEA-MalDap₂-Fc]-NH₂ | |
| 400 | Y-Aib-QGT-αMeF(2F)-TSDY-αMeS-I-αMeL-LD-Orn-K(AEEA2-γGlu-C18_OH)AQ-αMe4Pal-EFIQ- | 935 |
| | αMeY-LIEGSPSSGAPPPSK(AEEA6-BEA-MalDap₂-Fc)-NH₂ | |
| 401 | H-Aib-HGT-αMeF(2F)-TSDY-αMeS-I-αMeL-LD-Orn-K(AEEA2-γGlu-C18_OH)AQ-Aib-EFIQ-αMeY- | 935 |
| | LLEGSPSSGAPPPSK[PEG₂₄-BEA-MalDap₂-Fc]-NH₂ | |
| 402 | H-Aib-HGT-αMeF(2F)-TSD-4Pal-SI-αMeL-LD-Orn-K(AEEA2-γGlu-C18_OH)AQ-αMe4Pal-EFIQ- | 935 |
| | αMeY-LLEGSPSSGAPPPSK[PEG₂₄-BEA-MalDap₂-Fc]-NH₂ | |
| 403 | Y-Aib-QGT-αMeF(2F)-TSDY-αMeS-I-αMeL-LD-Orn-K(AEEA-γGlu-C18_OH)AQ-αMe4Pal-EFIE- | 935 |
| | αMeY-LIEGSPSSGAPPPSK[PEG₂₄-BEA-MalDap₂-Fc]-NH₂ | |
| 404 | Y-Aib-QGT-αMeF(2F)-TSD-4Pal-αMeS-I-αMeL-LD-Orn-K(AEEA-γGlu-C18_OH)AQ-αMe4Pal- | 935 |
| | EFIQ-αMeY-LIEGSPSSGAPPPSK[PEG₂₄-BEA-MalDap₂-Fc]-NH₂ | |
| 405 | Y-Aib-QGT-αMeF(2F)-TSDY-αMeS-I-αMeL-LD-Orn-K(AEEA2-γGlu-C18_OH)AQ-αMe4Pal-DFIQ- | 935 |
| | αMeY-LIEGSPSSGAPPPSK(AEEA6-BEA-MalDap₂-Fc)-NH₂ | |
| 406 | Y-Aib-QGT-αMeF(2F)-TSDY-αMeS-I-αMeL-LD-Orn-K(AEEA2-γGlu-C18_OH)AQ-αMe4Pal-Orn- | 935 |
| | FIE-αMeY-LIA-Aib-SPSSGAPPPSK(AEEA6-BEA-MalDap₂-Fc)-NH₂ | |
| 407 | Y-Aib-QGT-αMeF(2F)-TSDY-αMeS-I-αMeL-LD-Orn-K(AEEA2-γGlu-C18_OH)AQ-αMe4Pal-EFIQ- | 935 |
| | αMeY-LLEGSPSSGAPPPS-K(AEEA6-BEA-MalDap₂-Fc)-NH₂ | |
| 408 | Y-Aib-QGT-αMeF(2F)-TSDY-αMeS-I-αMeL-LD-Orn-K(AEEA2-γGlu-C18_OH)AQ-αMe4Pal-EFIQ- | 935 |
| | αMeY-LLE-Aib-SPSSGAPPPSK(AEEA6-BEA-MalDap₂-Fc)-NH₂ | |
| 409 | H-Aib-QGT-αMeF(2F)-TSDY-αMeS-I-αMeL-LD-Orn-K(AEEA2-γGlu-C18_OH)AQ-αMe4Pal-EFIE- | 935 |
| | αMeY-LIEGSPSSGAPPPSK[PEG₂₄-BEA-MalDap₂-Fc]-NH₂ | |
| 410 | H-Aib-QGT-αMeF(2F)-TSDY-αMeS-I-αMeL-LD-Orn-K(AEEA2-γGlu-C18_OH)AQ-αMe4Pal-EFIE- | 935 |
| | αMeY-LIE-Aib-SPSSGAPPPSK[PEG₂₄-BEA-MalDap₂-Fc]-NH₂ | |
| 411 | H-Aib-QGT-αMeF(2F)-TSDY-αMeS-I-αMeL-LD-Orn-K(AEEA2-γGlu-C18_OH)AQ-αMe4Pal-EFIE- | 935 |
| | αMeY-LLEGSPSSGAPPPSK[PEG₂₄-BEA-MalDap₂-Fc]-NH₂ | |
| 412 | H-Aib-QGT-αMeF(2F)-TSDY-αMeS-I-αMeL-LD-Orn-K(AEEA2-γGlu-C18_OH)AQ-αMe4Pal-EFIE- | 935 |
| | αMeY-LLE-Aib-SPSSGAPPPSK[PEG₂₄-BEA-MalDap₂-Fc]-NH₂ | |
| 413 | H-Aib-QGT-αMeF(2F)-TSDY-αMeS-I-αMeL-LD-Orn-K(AEEA-γGlu-C18_OH)AQ-αMe4Pal-EFIE- | 935 |
| | αMeY-LIEGSPSSGAPPPSK[PEG₂₄-BEA-MalDap2-Fc]-NH₂ | |
| 414 | H-Aib-QGT-αMeF(2F)-TSDY-αMeS-I-αMeL-LD-Orn-K(AEEA-γGlu-C18_OH)AQ-αMe4Pal-EFIE- | 935 |
| | αMeY-LIE-Aib-SPSSGAPPPSK[PEG₂₄-BEA-MalDap₂-Fc]-NH₂ | |
| 415 | H-Aib-QGT-αMeF(2F)-TSDY-αMeS-I-αMeL-LD-Orn-K(AEEA-γGlu-C18_OH)AQ-αMe4Pal-EFIE- | 935 |
| | αMeY-LLEGSPSSGAPPPSK[PEG₂₄-BEA-MalDap₂-Fc]-NH₂ | |
| 416 | H-Aib-QGT-αMeF(2F)-TSDY-αMeS-I-αMeL-LD-Orn-K(AEEA2-γGlu-C18_OH)AQ-αMe4Pal-EFIQ- | 935 |
| | αMeY-LIE-Aib-SPSSGAPPPSK[PEG₂₄-BEA-MalDap₂-Fc]-NH₂ | |
| 417 | H-Aib-QGT-αMeF(2F)-TSDY-αMeS-I-αMeL-LD-Orn-K(AEEA2-γGlu-C18_OH)AQ-αMe4Pal-EFIQ- | 935 |
| | αMeY-LLE-Aib-SPSSGAPPPSK[PEG₂₄-BEA-MalDap₂-Fc]-NH₂ | |
| 418 | H-Aib-QGT-αMeF(2F)-TSDY-αMeS-I-αMeL-LD-Orn-K(AEEA-γGlu-C18_OH)AQ-αMe4Pal-EFIQ- | 935 |
| | αMeY-LIE-Aib-SPSSGAPPPSK[PEG₂₄-BEA-MalDap₂-Fc]-NH₂ | |
| 419 | H-Aib-QGT-αMeF(2F)-TSDY-αMeS-I-αMeL-LD-Orn-K(AEEA-γGlu-C18_OH)AQ-αMe4Pal-EFIQ- | 935 |
| | αMeY-LLE-Aib-SPSSGAPPPSK[PEG₂₄-BEA-MalDap₂-Fc]-NH₂ | |
| 420 | Y-αMeS-QGT-αMeF(2F)-TSDY-αMeS-I-αMeL-LD-Orn-K(AEEA-γGlu-C18_OH)AQ-αMe4Pal-EFIE- | 935 |
| | αMeY-LIEGSPSSGAPPPSK[PEG₂₄-BEA-MalDap₂-Fc]-NH₂ | |
| 421 | Y-Iva-QGT-αMeF(2F)-TSDY-αMeS-I-αMeL-LD-Orn-K(AEEA-γGlu-C18_OH)AQ-αMe4Pal-EFIE- | 935 |
| | αMeY-LIEGSPSSGAPPPSK[PEG₂₄-BEA-MalDap₂-Fc]-NH₂ | |
| 422 | Y-Ac4c-QGT-αMeF(2F)-TSDY-αMeS-I-αMeL-LD-Orn-K(AEEA-γGlu-C18_OH)AQ-αMe4Pal-EFIE- | 935 |
| | αMeY-LIEGSPSSGAPPPSK[PEG₂₄-BEA-MalDap₂-Fc]-NH₂ | |
| 423 | H-Aib-QGT-αMeF(2F)-TSDY-αMeS-I-αMeL-LD-Orn-K(AEEA-γGlu-C18_OH)AQ-αMe4Pal-Orn- | 935 |
| | FIK[PEG₂₄-BEA-MalDap₂-Fc]-αMeY-LLEGSPSSGAPPPS-NH₂ | |
| 424 | H-Aib-QGT-αMeF(2F)-TSDY-αMeS-I-αMeL-LD-Orn-K(AEEA-γGlu-C18_OH)AQ-αMe4Pal- | 935 |
| | EFIK[PEG₂₄-BEA-MalDap₂-Fc]-αMeY-LLEGSPSSGAPPPS-NH₂ | |
| 425 | H-Aib-QGT-αMeF(2F)-TSDY-αMeS-I-αMeL-LD-Orn-K(AEEA-γGlu-C18_OH)AQ-αMe4Pal-Orn- | 935 |
| | FIe-αMeY-LIEGSPSSGAPPPSK[PEG₂₄-BEA-MalDap₂-Fc]-NH₂ | |
| 426 | H-Aib-QGT-αMeF(2F)-TSDY-αMeS-I-αMeL-LD-Orn-K(AEEA-γGlu-C18_OH)AQ-αMe4Pal-Orn- | 935 |
| | FIe-αMeY-LLEGSPSSGAPPPSK[PEG₂₄-BEA-MalDap₂-Fc]-NH₂ | |
| 427 | H-Aib-QGT-αMeF(2F)-TSDY-αMeS-I-αMeL-LD-Orn-K(AEEA-γGlu-C18_OH)AQ-αMe4Pal-Orn- | 935 |
| | FIE-αMeY-LIEGSPSSGAPPPSK[PEG₂₄-BEA-MalDap₂-Fc]-NH₂ | |
| 428 | H-Aib-QGT-αMeF(2F)-TSDY-αMeS-I-αMeL-LD-Orn-K(AEEA-γGlu-C18_OH)AQ-αMe4Pal-Orn- | 935 |
| | FIE-αMeY-LLEGSPSSGAPPPSK[PEG₂₄-BEA-MalDap₂-Fc]-NH₂ | |
| 429 | Y-Aib-QGT-αMeF(2F)-TSDY-αMeS-I-αMeL-LD-Orn-K(AEEA-γGlu-C18_OH)AQ-αMe4Pal-EFIE- | 935 |
| | αMeY-LLEGSPSSGAPPPSK[PEG₂₄-BEA-MalDap₂-Fc]-NH₂ | |
| 430 | Y-Aib-QGT-αMeF(2F)-TSDY-αMeS-I-αMeL-LD-Orn-K(AEEA-γGlu-C18_OH)AQ-αMe4Pal-EFIe- | 935 |
| | αMeY-LLEGSPSSGAPPPSK[PEG₂₄-BEA-MalDap₂-Fc]-NH₂ | |
| 431 | Y-Aib-QGT-αMeF(2F)-TSDY-αMeS-I-αMeL-LD-Orn-K(AEEA-γGlu-C18_OH)AQ-αMe4Pal-Orn- | 935 |
| | FIE-αMeY-LLEGSPSSGAPPPSK[PEG₂₄-BEA-MalDap₂-Fc]-NH₂ | |
| 432 | Y-Aib-QGT-αMeF(2F)-TSDY-αMeS-I-αMeL-LD-Orn-K(AEEA-γGlu-C18_OH)AQ-αMe4Pal-Orn- | 935 |
| | FIe-αMeY-LLEGSPSSGAPPPSK[PEG₂₄-BEA-MalDap₂-Fc]-NH₂ | |
| 433 | Y-Aib-QGT-αMeF(2F)-TSDY-αMeS-I-αMeL-LD-Orn-K(AEEA-γGlu-C18_OH)AQ-αMe4Pal-EFIe- | 935 |
| | αMeY-LIEGSPSSGAPPPSK[PEG₂₄-BEA-MalDap₂-Fc]-NH₂ | |
| 434 | Y-Aib-QGT-αMeF(2F)-TSDY-αMeS-I-αMeL-LD-Orn-K(AEEA-γGlu-C18_OH)AQ-αMe4Pal-Orn- | 935 |
| | FIE-αMeY-LIEGSPSSGAPPPSK[PEG₂₄-BEA-MalDap₂-Fc]-NH₂ | |
| 435 | Y-Aib-QGT-αMeF(2F)-TSDY-αMeS-I-αMeL-LD-Orn-K(AEEA-γGlu-C18_OH)AQ-αMe4Pal-Orn- | 935 |
| | FIe-αMeY-LIEGSPSSGAPPPSK[PEG₂₄-BEA-MalDap₂-Fc]-NH₂ | |
| 436 | Y-Aib-QGT-αMeF(2F)-TSDY-αMeS-I-αMeL-LD-Orn-K(AEEA-γGlu-C18_OH)AQ-Aib-QFIE-αMeY- | 935 |
| | LLEGSPSSGAPPPSK[PEG₂₄-BEA-MalDap₂-Fc]-NH₂ | |
| 437 | Y-Aib-QGT-αMeF(2F)-TSDY-αMeS-I-αMeL-LD-Orn-K(AEEA-γGlu-C18_OH)AQ-Aib-Orn-FIe- | 935 |
| | αMeY-LLEGSPSSGAPPPSK[PEG₂₄-BEA-MalDap₂-Fc]-NH₂ | |
| 438 | Y-Aib-QGT-αMeF(2F)-TSDY-αMeS-I-αMeL-LD-Orn-K(AEEA-γGlu-C18_OH)AQ-Aib-Orn-FIE- | 935 |
| | αMeY-LLEGSPSSGAPPPSK[PEG₂₄-BEA-MalDap₂-Fc]-NH₂ | |
| 439 | Y-Aib-QGT-αMeF(2F)-TSDY-αMeS-I-αMeL-LD-Orn-K(AEEA-γGlu-C18_OH)AQ-Aib-Orn-FIq- | 935 |
| | αMeY-LLEGSPSSGAPPPSK[PEG₂₄-BEA-MalDap₂-Fc]-NH₂ | |
| 440 | Y-Aib-QGT-αMeF(2F)-TSDY-αMeS-I-αMeL-LD-Orn-K(AEEA-γGlu-C18_OH)AQ-Aib-Orn-FIQ- | 935 |
| | αMeY-LLEGSPSSGAPPPSK[PEG₂₄-BEA-MalDap₂-Fc]-NH₂ | |
| 441 | Y-Aib-QGT-αMeF(2F)-TSDY-αMeS-I-αMeL-LD-Orn-K(AEEA-γGlu-C18_OH)AQ-Aib-EFIe-αMeY- | 935 |
| | LLEGSPSSGAPPPSK[PEG₂₄-BEA-MalDap₂-Fc]-NH₂ | |
| 442 | Y-Aib-QGT-αMeF(2F)-TSDY-αMeS-I-αMeL-LD-Orn-K(AEEA-γGlu-C18_OH)AQ-Aib-EFIE-αMeY- | 935 |
| | LLEGSPSSGAPPPSK[PEG₂₄-BEA-MalDap₂-Fc]-NH₂ | |
| 443 | Y-Aib-QGT-αMeF(2F)-TSDY-αMeS-I-αMeL-LD-Orn-K(AEEA-γGlu-C18_OH)AQ-Aib-EFIq-αMeY- | 935 |
| | LLEGSPSSGAPPPSK[PEG₂₄-BEA-MalDap₂-Fc]-NH₂ | |
| 444 | H-Ac4c-QGT-αMeF(2F)-TSDY-αMeS-I-αMeL-LD-Orn-K(AEEA-γGlu-C18_OH)AQ-αMe4Pal-EFIE- | 935 |
| | αMeY-LIEGSPSSGAPPPSK[PEG₂₄-BEA-MalDap₂-Fc]-NH₂ | |
| 445 | YaQGT-αMeF(2F)-TSDY-αMeS-I-αMeL-LD-Orn-K(AEEA-γGlu-C18_OH)AQ-αMe4Pal-EFIE-αMeY- | 935 |
| | LIEGSPSSGAPPPSK[PEG₂₄-BEA-MalDap₂-Fc]-NH₂ | |
| 446 | YaQGT-αMeF(2F)-TSDY-αMeS-I-αMeL-LD-Orn-K(AEEA-γGlu-C18_OH)AQ-αMe4Pal-Orn-FIE- | 935 |
| | αMeY-LIEGSPSSGAPPPSK[PEG₂₄-BEA-MalDap₂-Fc]-NH₂ | |
| 447 | YaQGT-αMeF(2F)-TSDY-αMeS-I-αMeL-LD-Orn-K(AEEA-γGlu-C18_OH)AQ-αMe4Pal-Orn-FIe- | 935 |
| | αMeY-LIEGSPSSGAPPPSK[PEG₂₄-BEA-MalDap₂-Fc]-NH₂ | |
| 448 | YaQGT-αMeF(2F)-TSDY-αMeS-I-αMeL-LD-Orn-K(AEEA-γGlu-C18_OH)AQ-αMe4Pal-EFIE-αMeY- | 935 |
| | LLEGSPSSGAPPPSK[PEG₂₄-BEA-MalDap₂-Fc]-NH₂ | |
| 449 | YaQGT-αMeF(2F)-TSDY-αMeS-I-αMeL-LD-Orn-K(AEEA-γGlu-C18_OH)AQ-αMe4Pal-EFIe-αMeY- | 935 |
| | LLEGSPSSGAPPPSK[PEG₂₄-BEA-MalDap₂-Fc]-NH₂ | |
| 450 | YaQGT-αMeF(2F)-TSDY-αMeS-I-αMeL-LD-Orn-K(AEEA-γGlu-C18_OH)AQ-αMe4Pal-Orn-FIE- | 935 |
| | αMeY-LLEGSPSSGAPPPSK[PEG₂₄-BEA-MalDap₂-Fc]-NH₂ | |
| 451 | YaQGT-αMeF(2F)-TSDY-αMeS-I-αMeL-LD-Orn-K(AEEA-γGlu-C18_OH)AQ-Aib-Orn-FIq-αMeY- | 935 |
| | LLEGSPSSGAPPPSK[PEG₂₄-BEA-MalDap₂-Fc]-NH₂ | |
| 452 | YaQGT-αMeF(2F)-TSDY-αMeS-I-αMeL-LD-Orn-K(AEEA-γGlu-C18_OH)AQ-Aib-Orn-FIQ-αMeY- | 935 |
| | LLEGSPSSGAPPPSK[PEG₂₄-BEA-MalDap₂-Fc]-NH₂ | |
| 453 | YaQGT-αMeF(2F)-TSDY-αMeS-I-αMeL-LD-Orn-K(AEEA-γGlu-C18_OH)AQ-Aib-Orn-FIE-αMeY- | 935 |
| | LIEGSPSSGAPPPSK[PEG₂₄-BEA-MalDap₂-Fc]-NH₂ | |
| 454 | Y-Aib-QGT-αMeF(2F)-TSD-4Pal-SI-αMeL-LD-Orn-K(AEEA-γGlu-C18_OH)AQ-αMe4Pal-Orn- | 935 |
| | FIE-αMeY-LIEGSPSSGAPPPSK[PEG₂₄-BEA-MalDap₂-Fc]-NH₂ | |
| 455 | Y-Aib-QGT-αMeF(2F)-TSD-4Pal-αMeS-I-αMeL-LD-Orn-K(AEEA-γGlu-C18_OH)AQ-αMe4Pal- | 935 |
| | Orn-FIe-αMeY-LIEGSPSSGAPPPSK[PEG₂₄-BEA-MalDap₂-Fc]-NH₂ | |
| 456 | Y-Aib-QGT-αMeF(2F)-TSD-4Pal-αMeS-I-αMeL-LD-Orn-K(AEEA-γGlu-C18_OH)AQ-αMe4Pal- | 935 |
| | EFIE-αMeY-LIEGSPSSGAPPPSK[PEG₂₄-BEA-MalDap₂-Fc]-NH₂ | |
| 457 | Y-Aib-QGT-αMeF(2F)-TSD-4Pal-SI-αMeL-LD-Orn-K(AEEA-γGlu-C18_OH)AQ-αMe4Pal-EFIE- | 935 |
| | αMeY-LIEGSPSSGAPPPSK[PEG₂₄-BEA-MalDap₂-Fc]-NH₂ | |
| 458 | Y-Aib-QGT-αMeF(2F)-TSDY-αMeS-I-αMeL-LD-Orn-K(AEEA-γGlu-C18_OH)AQ-Aib-Orn-FIE- | 935 |
| | αMeY-LIEGSPSSGAPPPSK[PEG₂₄-BEA-MalDap₂-Fc]-NH₂ | |
| 459 | Y-Aib-QGT-αMeF(2F)-TSD-4Pal-αMeS-I-αMeL-LD-Orn-K(AEEA-γGlu-C18_OH)AQ-αMe4Pal- | 935 |
| | EFIe-αMeY-LIEGSPSSGAPPPSK[PEG₂₄-BEA-MalDap₂-Fc]-NH₂ | |
| 460 | YaQGT-αMeF(2F)-TSDY-αMeS-I-αMeL-LD-Orn-K(AEEA2-γGlu-C18_OH)AQ-αMe4Pal-Orn-FIE- | 935 |
| | αMeY-LIEGSPSSGAPPPSK[PEG₂₄-BEA-MalDap₂-Fc]-NH₂ | |
| 461 | YaQGT-αMeF(2F)-TSDY-αMeS-I-αMeL-LD-Orn-K(AEEA2-γGlu-C18_OH)AQ-αMe4Pal-Orn-FIE- | 935 |
| | αMeY-LLEGSPSSGAPPPSK[PEG₂₄-BEA-MalDap₂-Fc]-NH₂ | |
| 462 | Y-Aib-QGT-αMeF(2F)-TSDY-αMeS-I-αMeL-LD-Orn-K(AEEA-γGlu-C18_OH)AQ-Aib-Orn-FIe- | 935 |
| | αMeY-LIEGSPSSGAPPPSK[PEG₂₄-BEA-MalDap₂-Fc]-NH₂ | |
| 463 | NMeY-Aib-QGT-αMeF(2F)-TSDY-αMeS-I-αMeL-LD-Orn-K(AEEA2-γGlu-C18_OH)AQ-αMe4Pal- | 935 |
| | EFIE-αMeY-LIEGSPSSGAPPPSK[PEG₂₄-BEA-MalDap₂-Fc]-NH₂ | |
| 464 | Y-Aib-QGT-αMeF(2F)-TSDY-αMeS-I-αMeL-LD-Orn-K(AEEA2-γGlu-C20_OH)AQ-αMe4Pal-Orn- | 935 |
| | FIe-αMeY-LIEGSPSSGAPPPSK[PEG₂₄-BEA-MalDap₂-Fc]-NH₂ | |
| 465 | Y-Aib-QGT-αMeF(2F)-TSDY-αMeS-I-αMeL-LD-Orn-K(AEEA2-γGlu-C20_OH)AQ-αMe4Pal-Orn- | 935 |
| | FIQ-αMeY-LIEGSPSSGAPPPSK[PEG₂₄-BEA-MalDap₂-Fc]-NH₂ | |
| 466 | Y-Aib-QGT-αMeF(2F)-TSD-4Pal-αMeS-I-αMeL-LD-Orn-K(AEEA2-γGlu-C18_OH)AQ-αMe4Pal- | 936 |
| | Orn-FIe-αMeY-LIEGSPSSGAPPPSK(PEG₂₄-BEA-MalDap₂-Fc KRQ)-NH₂ | |
| 467 | Y-Aib-QGT-αMeF(2F)-TSDY-αMeS-I-αMeL-LD-Orn-K(AEEA2-γGlu-C18_OH)AQ-αMe4Pal-Orn- | 936 |
| | FIe-αMeY-LIEGSPSSGAPPPSK[PEG₂₄-BEA-MalDap₂-Fc KRQ]-NH₂ | |
| 468 | Y-Aib-QGT-αMeF(2F)-TSD-4Pal-αMeS-I-αMeL-LD-Orn-K(AEEA2-γGlu-C18_OH)AQ-αMe4Pal- | 936 |
| | Orn-FIE-αMeY-LIEGGGGGGGSGGGGSGAPAPAPAPAPAPK[BEA-MalDap₂-Fc KRQ]-NH₂ | |
| 469 | Y-Aib-QGT-αMeF(2F)-TSDY-αMeS-I-αMeL-LD-Orn-K(AEEA2-γGlu-C18_OH)AQ-αMe4Pal-Orn- | 936 |
| | FIe-αMeY-LIEGGGGGGGSGGGGSGAPAPAPAPAPAPK[BEA-MalDap₂-Fc KRQ]-NH₂ | |
| 470 | Y-Aib-QGT-αMeF(2F)-TSDY-αMeS-I-αMeL-LD-Orn-K(AEEA2-γGlu-C18 OH)AQ-αMe4Pal-Orn- | 936 |
| | FIe-αMeY-LIEGSPSSGAPPPSK(AEEA6-GPAPAPAPAPAPA-[BEAMalDap₂-Fc KRQ]-NH₂ | |
| 471 | Y-Aib-QGT-αMeF(2F)-TSDY-αMeS-I-αMeL-LD-Orn-K(AEEA2-γGlu-C18_OH)AQ-αMe4Pal-Orn- | 936 |
| | FIe-αMeY-LIEGSPSSGAPPPSK[PEG₂₄-BEA-MalDap₂-Fc KRQ]-NH₂ | |
| 472 | Y-Aib-QGT-αMeF(2F)-TSDY-αMeS-I-αMeL-LD-Orn-K(AEEA2-γGlu-C18_OH)AQ-αMe4Pal-Orn- | 936 |
| | FIe-αMeY-LIE-Aib-SPSSGAPPPSK[PEG₂₄-BEA-MalDap₂-Fc KRQ]-NH₂ | |
| 473 | Y-Aib-QGT-αMeF(2F)-TSDY-αMeS-I-αMeL-LD-Orn-K(AEEA2-γGlu-C18_OH)AQ-αMe4Pal-Orn- | 936 |
| | FIe-αMeY-LIEGSPSSGAPPPSK(AEEA6-BEA-MalDap₂-Fc KRQ)-NH₂ | |
| 474 | Y-Aib-QGT-αMeF(2F)-TSDY-αMeS-I-αMeL-LD-Orn-K(AEEA2-γGlu-C18_OH)AQ-αMe4Pal-Orn- | 941 |
| | FIe-αMeY-LIE-Aib-GGGGGGSGGGGSGAPAPAPAPAPAPK[BEA-MalDap₂-Fc IG KRQ]-NH₂ | |
| 475 | Y-Aib-QGT-αMeF(2F)-TSDY-αMeS-I-αMeL-LD-Orn-K(AEEA2-γGlu-C18_OH)AQ-αMe4Pal-Orn- | 941 |
| | FIe-αMeY-LIE-Aib-SPSSGAPPPSK(AEEA6-GPAPAPAPAPAPA-[BEA-MalDap₂-Fc IG KRQ]-NH₂ | |
| 476 | Y-Aib-QGT-αMeF(2F)-TSDY-αMeS-I-αMeL-LD-Orn-K(AEEA2-γGlu-C18_OH)AQ-αMe4Pal-Orn- | 941 |
| | FIe-αMeY-LIE-Aib-SPSSGAPPPSK[AEEA6-BEA-MalDap₂-Fc IG KRQ]-NH₂ | |
| 477 | Y-Aib-QGT-αMeF(2F)-TSDY-αMeS-I-αMeL-LD-Orn-K(AEEA2-γGlu-C18_OH)AQ-αMe4Pal-Orn- | 935 |
| | FIE-αMeY-LIE-Aib-SPSSGAPPPSK[PEG₂₄-BEA-MalDap₂-Fc]-NH₂ | |
| 478 | Y-Aib-QGT-αMeF(2F)-TSDY-αMeS-I-αMeL-LD-Orn-K(AEEA2-γGlu-C18_OH)AQ-αMe4Pal-Orn- | 935 |
| | FIQ-αMeY-LIE-Aib-SPSSGAPPPSK[PEG₂₄-BEA-MalDap₂-Fc]-NH₂ | |
| 479 | Y-Aib-EGT-αMeF(2F)-TSD-4Pal-SI-αMeL-LDEK(AEEA2-γGlu-C18_OH)AQ-Aib-EFIe-αMeY- | 935 |
| | LIEGSPSSGAPPPSK[PEG₂₄-dCAP]-Fc-NH₂ | |
| 480 | Y-Aib-EGT-αMeF(2F)-TSD-4Pal-SI-αMeL-LD-Orn-K(ϵK2-γGlu-C18_OH)AQ-Aib-EFIe-αMeY- | 935 |
| | LIEGSPSSGAPPPSK[PEG₂₄-BEA-(MSPT)₂-Fc]-NH₂ | |
| 481 | Y-Aib-EGT-αMeF(2F)-TSD-4Pal-SI-αMeL-LD-Orn-K(ϵK2-γGlu-C18_OH)AQ-Aib-EFIe-αMeY- | 935 |
| | LIEGSPSSGAPPPSK[PEG₂₄-BEA-(Acetyl)₂-Fc]-NH₂ | |
| 482 | Y-Aib-EGT-αMeF(2F)-TSD-4Pal-SI-αMeL-LD-Orn-K(ϵK2-γGlu-C18_OH)AQ-Aib-EFIe-αMeY- | 935 |
| | LIEGSPSSGAPPPSK[PEG₂₄-BEA-(OD)₂-Fc]-NH₂ | |

[0514] Embodiment 22. A compound comprising any of the following Fc-acylated polypeptides:

[chemical structure]

[chemical structure]

[chemical structure]

[chemical structure]

[chemical structure]

[chemical structure]

[chemical structure]

[chemical structure]

[chemical structure]

[chemical structure]

[chemical structure]

[chemical structure]

[chemical structure]

[chemical structure]

[chemical structure]

[chemical structure]

[chemical structure]

[chemical structure]

[chemical structure]

[chemical structure]

[chemical structure]

[chemical structure]

[chemical structure]

[chemical structure]

[chemical structure]

[chemical structure]

[chemical structure]

[chemical structure]

[chemical structure]

[chemical structure]

[chemical structure]

[chemical structure]

[0515] Embodiment 22. The compound of any one of embodiments 1-22, or a pharmaceutically acceptable salt thereof, wherein the compound has greater potency at each of the GIP and GLP-1 receptors as compared to native GIP (SEQ ID NO:1223) and GLP-17-36 (SEQ ID NO:1221).

[0516] Embodiment 23. The compound of any one of embodiments 1-22, or a pharmaceutically acceptable salt thereof, wherein the compound has greater potency at each of the glucagon, GIP and GLP-1 receptors as compared to native glucagon (SEQ ID NO:1222), GIP (SEQ ID NO:1223) and GLP-1₇₋₃₆ (SEQ ID NO:1221).

[0517] Embodiment 24. The compound of any one of embodiments 1-23, or a pharmaceutically acceptable salt thereof, wherein the compound has a sufficiently extended duration of action to allow for dosing as infrequently as once-monthly.

[0518] Embodiment 25. A pharmaceutical composition comprising the compound of any one of embodiments 1-24, or a pharmaceutically acceptable salt thereof, and at least one pharmaceutically acceptable carrier, diluent, or excipient.

[0519] Embodiment 26. The pharmaceutical composition of embodiment 25, wherein the composition is formulated for subcutaneous administration.

[0520] Embodiment 27. A method of treating a disease or condition selected from the group consisting of diabetes mellitus, obesity, chronic weight management, non-alcoholic fatty liver disease (NAFLD), non-alcoholic steatohepatitis (NASH), dyslipidemia, metabolic syndrome, chronic kidney disease (CKD), osteoarthritis (OA), obesity-related sleep apnea (OSA) polycystic ovary syndrome (PCOS), Parkinson's disease and Alzheimer's disease, the method comprising a step of: administering to an individual in need thereof an effective amount of a compound, or a pharmaceutically acceptable salt thereof, of any one of embodiments 1 to 26.

[0521] The invention is further illustrated by the following examples, which are not to be construed as limiting.

### EXAMPLES

### Preparation of Therapeutic Polypeptides

[0522] Processes for making exemplary compounds of the present disclosure are described below. It will be understood that these processes are not exclusive, and that compounds of the present disclosure may also be prepared using other processes known to persons skilled in the art.

[0523] Peptide intermediates intended for Fc conjugation are fully synthesized following conventional fluorenylmethyloxycarbonyl (Fmoc)/tert-Butyl (t-Bu) solid-phase peptide synthesis (SPPS) protocols. This process is carried out using the Symphony 12-Channel Multiplex Peptide Synthesizer (Protein Technologies, Inc., Tucson, AZ).

[0524] A linear peptide backbone with orthogonally protected lysine residues (4-methyltrityl (Mtt) and ivDde) at designated sequence positions is first synthesized. Following this, sequential deprotection and coupling steps introduce the ‘Linker-Fatty Acid’ moiety, followed by the ‘Linker-Fc Conjugation’ moiety. These modifications complete the synthesis of peptide intermediates before they are cleaved from the solid support and undergo subsequent purification, as described below:

### Procedure for Peptide Synthesis

[0525] Solid-phase peptide synthesis (SPPS) is conducted using 1% DVB cross-linked polystyrene resin (Fmoc-Rink-MBHA, 100-200 mesh, Chem-Impex International) with a substitution range of 0.3-0.6 mmol/g. Peptide backbones are assembled with N-Fmoc protected amino acids containing standard side-chain protecting groups, except for the residue at position 1 (e.g., Boc-L-Tyr(OtBu)-OH or Boc-L-His(Boc)-OH), the lysine residue at position 17 (Fmoc-L-Lys(Mtt)-OH), and the lysine residues at positions 24, 28, 32, or 40 (Fmoc-L-Lys(ivDde)-OH). Before each coupling step, Fmoc groups are removed using 20% piperidine in DMF (two treatments of 8 minutes each). To initiate coupling, equimolar amounts of Fmoc amino acid (0.3 M in DMF), diisopropylcarbodiimide (0.9 M in DCM), and Oxyma (0.9 M in DMF) are combined at a 9-fold molar excess over the theoretical peptide loading, with the reaction maintained at 60° C. Coupling times vary: standard Fmoc-amino acids are coupled for 40 minutes, whereas Fmoc-α-methylated amino acids require 3 hours, as do Fmoc-amino acids being coupled onto an α-methylated residue. Extended coupling times of 6 hours apply for Fmoc-amino acids at positions 5 and 6, while residues at positions 1-4 undergo coupling for 3 hours. Upon completion of the peptide backbone synthesis, the resin undergoes thorough washing with DCM to remove residual DMF.

### Procedure for Assembly of Linker-Fatty Acid Moiety

[0526] After peptide backbone synthesis, the Mtt protecting group on the lysine at position 17 is selectively removed by treatment with 30% hexafluoroisopropanol in DCM (four treatments of 30 minutes each), followed by thorough washing with DCM. The linker-fatty acid moiety is assembled using a coupling approach similar to the previous steps, employing selected N-Fmoc protected amino acid derivatives as needed. These may include 2-[2-(2-Fmoc-amino-ethoxy)-ethoxy]-acetic acid (Fmoc-AEEA-OH), Fmoc-glutamic acid α-t-butyl ester (Fmoc-Glu(OH)-OtBu), Nα-tert-butoxycarbonyl-Nε-Fmoc-lysine (Boc-L-Lys(Fmoc)-OH), and 18-(tert-butoxy)-18-oxo-octadecanoic acid. Each derivative is coupled in amounts ranging from 4 to 9 equivalents relative to resin loading (0.15-0.3 M in DMF) in the presence of diisopropylcarbodiimide (9 equivalents, 0.9 M in DCM) and Oxyma (9 equivalents, 0.9 M in DMF). The coupling reactions proceed at 60° C. for 6 hours. Prior to each coupling step, Fmoc groups are removed using 20% piperidine in DMF (two treatments of 8 minutes each).

### Procedure for Assembly of Linker-Fc Conjugation Moiety

[0527] After assembling the linker-fatty acid moiety, the ivDde protecting group on the lysine residues at positions 24, 28, 32, or 40 is selectively removed by treatment with 3% hydrazine in DMF (four treatments of 3 minutes each). The resin is thoroughly washed with DMF, DCM, and isopropyl alcohol to ensure complete removal of any residual hydrazine. If a linker is present, it is constructed using a similar approach to previous coupling steps, utilizing selected N-Fmoc protected amino acid derivatives as needed. These may include Fmoc-N-amido-PEG₂₄-Acid, 2-[2-(2-Fmoc-amino-ethoxy)-ethoxy]-acetic acid (Fmoc-AEEA-OH), or Fmoc-amino acids with standard protecting groups. Each derivative is coupled in amounts ranging from 2 to 9 equivalents relative to resin loading (0.15-0.3 M in DMF) in the presence of diisopropylcarbodiimide (9 equivalents, 0.9 M in DCM) and Oxyma (9 equivalents, 0.9 M in DMF). The coupling reactions proceed at 60° C. for 2 to 6 hours, as required. Prior to each coupling step, Fmoc groups are removed using 20% piperidine in DMF (two treatments of 8 minutes each).

### Coupling of BEA

[0528] Once the desired linker is assembled, the terminal Fmoc group is removed using 20% piperidine in DMF (two treatments of 8 minutes each). Coupling to ‘BEA’ is then performed by adding 4-(bis(2-((((9H-fluoren-9-yl)methoxy)carbonyl)amino)ethyl)amino)-4-oxobutanoic acid (Fmoc2-BEA-OH, 6 equivalents in DMF), diisopropylcarbodiimide (9 equivalents, 0.9 M in DCM), and Oxyma (9 equivalents, 0.9 M in DMF). The reaction is maintained at 60° C. for 4 hours. Upon completion, both Fmoc groups are removed with 20% piperidine in DMF (two treatments of 8 minutes each) before introducing the desired thiol-reactive conjugation moieties, as detailed below:

### For Peptide Intermediates Containing BEA-(MalDap)₂

[0529] To the resin-bound diamine, (S)-3-((tert-butoxycarbonyl)amino)-2-(2,5-dioxo-2,5-dihydro-1H-pyrrol-1-yl)propanoic acid (N-Mal-L-Dap(Boc)-OH, 3.6 equivalents in DMF), diisopropylcarbodiimide (9 equivalents, 0.9 M in DCM), and Oxyma (9 equivalents, 0.9 M in DMF) are introduced, allowing the reaction to proceed at room temperature for 3 hours.

### For Peptide Intermediates Containing BFA-(MSPT)₂

[0530] To the resin-bound diamine, N,N-Diisopropylethylamine (1.7 equivalents) and 2,5-dioxopyrrolidin-1-yl 2-(2-(2-(4-(5-(methylsulfonyl)-1H-tetrazol-1-yl)phenoxy)ethoxy)ethoxy)acetate (MSPT-NHS Ester, 3 equivalents in DMF) are introduced, allowing the reaction to proceed at room temperature for 2.5 hours.

### For Peptide Intermediates Containing BEA-(AcBr)₂

[0531] N,N-Diisopropylethylamine (1.7 equivalents) and 2,5-dioxopyrrolidin-1-yl 2-bromoacetate (4.1 equivalents in DMF) are added to the resin-bound diamine, and the reaction allowed to proceed at room temperature for 2.5 hours.

### For Peptide Intermediates Containing BFA-(OD)₂

[0532] N,N-Diisopropylethylamine (1.7 equivalents) and 2,5-dioxopyrrolidin-1-yl 2-(2-(2-(4-(5-(methylsulfonyl)-1,3,4-oxadiazol-2-yl)phenoxy)ethoxy)ethoxy)acetate (OD-NHS Ester, 3 equivalents in DMF) are added to the resin-bound diamine, and the reaction allowed to proceed at room temperature for 2.5 hours.

### For Peptide Intermediates Containing BEA-(β-MalDap)₂

[0533] To the resin-bound diamine, N,N-Diisopropylethylamine (1.7 equivalents) and 2,5-Dioxopyrrolidin-1-yl (S)-2-((tert-butoxycarbonyl)amino)-3-(2,5-dioxo-2,5-dihydro-1H-pyrrol-1-yl)propanoate (Boc-L-Dap(Mal)-NHS Ester, 3 equivalents in DMF) were added, and the mixture allowed to proceed at room temperature overnight.

### For Peptide Intermediates Containing a Single MalDap (for Conjugation to Fc-eCys)

[0534] To the resin-bound amine (no BEA is present), (S)-3-((tert-butoxycarbonyl)amino)-2-(2,5-dioxo-2,5-dihydro-1H-pyrrol-1-yl)propanoic acid (N-Mal-L-Dap(Boc)-OH, 1.8 equivalents in DMF), diisopropylcarbodiimide (9 equivalents, 0.9 M in DCM), and Oxyma (9 equivalents, 0.9 M in DMF) are introduced, allowing the reaction to proceed at room temperature for 3 hours.

### For Peptide Intermediates Containing a Single MSPT (for Conjugation to Fc-eCys)

[0535] To the resin-bound amine (no BEA is present), 2-(2-(2-(4-(5-(methylsulfonyl)-1H-tetrazol-1-yl)phenoxy)ethoxy)ethoxy)acetic acid (MSPT-acid, 1.8 equivalents in DMF), diisopropylcarbodiimide (9 equivalents, 0.9 M in DCM), and Oxyma (9 equivalents, 0.9 M in DMF) are introduced, allowing the reaction to proceed at room temperature for 3 hours.

### Cleavage and Purification of Peptide Intermediates

[0536] After completion of the on-resin synthetic steps detailed above, the peptide resin is washed with DCM and then thoroughly air-dried. The resin is treated with 10 mL of cleavage cocktail (trifluoroacetic acid:water:triisopropylsilane, 85:5:10 v/v) for 2.5 hours at room temperature. The resin is filtered off, washed twice each with 2 mL of neat TFA, and the combined filtrates are treated with 5-fold (by volume) cold diethyl ether (−20° C.) to precipitate the crude peptide. The peptide/ether suspension is then centrifuged at 5500 rpm for 2 min to form a solid pellet, the supernatant is decanted, and the solid pellet is triturated with ether two additional times and dried under nitrogen. The crude peptide is solubilized in 20% acetonitrile/20% acetic acid/60% water and purified by RP-HPLC on a Luna 5 μm Phenyl-Hexyl Preparative Column (21×250 mm, Phenomenex) with linear gradients of 100% acetonitrile in a 0.1% TFA/water buffer system (e.g. 30-50% acetonitrile over 75 min). Product purity is assessed using analytical RP-HPLC and the pooling criteria is >95%. Pooled fractions are frozen and concentrated by lyophilization to yield the peptide intermediate as a TFA salt.

### Synthesis of 4-(bis(2-((((9H-fluoren-9-yl)methoxy)carbonyl)amino)ethyl)amino)-4-oxobutanoic Acid (Fmoc2-BEA-OH)

[chemical structure]

[0537] A solution of N-(9-fluorenylmethoxycarbonyloxy) succinimide (19.4 g, 56.4 mmol) in dichloromethane (80 mL) was added over 45 min to a solution of diethylenetriamine (3.1 mL, 28 mmol) in dichloromethane (30 mL) cooled at −78° C. After 2 hours, the mixture was warmed to ambient temperature, and succinic anhydride (9.91 g, 98 mmol) and DMAP (691 mg, 5.60 mmol) were added. The mixture was stirred at ambient temperature for 15 hours, then the pH adjusted to 5 by slow addition of 1N HCl (˜20 mL). The phases were separated and the aqueous layer extracted with DCM (2×100 mL). The combined organic layers were washed with saturated aqueous NaCl, then dried over magnesium sulfate. The solvent was removed under reduced pressure and purification by silica gel chromatography (660 g; DCM (5 min) then 5% MeOH/DCM (15 min) then 10% MeOH/DCM (25 min) afforded the title product (911.84 g, 65%) as a white powder. ES/MS m/z: 648 (M+1).

### Synthesis of 2,5-dioxopyrrolidin-1-yl 2-(2-(2-(4-(5-(methylsulfonyl)-1H-tetrazol-1-yl)phenoxy)ethoxy)ethoxy)acetate (MSPT-NHS Ester)

### Step 1

[chemical structure]

[0538] 4-(5-mercapto-1H-tetrazol-1-yl)phenol (4.00 g, 20.6 mmol) was dissolved in tetrahydrofuran (50 mL), and the mixture cooled in an ice-bath, prior to the addition of NN-diisopropylethylamine (4.31 g, 33.3 mmol). A suspension formed after stirring for 10 minutes. Iodomethane (1.54 mL, 24.7 mmol) was added dropwise via syringe over 1 min. The reaction mixture was stirred for 20 minutes with cooling in an ice-bath, then at room temperature for 12 hours. The mixture was diluted with EtOAc (100 mL), and washed with saturated aqueous NH₄Cl (2×50 mL). The organic layer was separated, then dried over sodium sulfate, filtered and concentrated in vacuo to provide 4-(5-(methylthio)-1H-tetrazol-1-yl)phenol (4.2 g, 93% yield) that can be used directly in the next step without further purification. LCMS—mz=209 (M+1).

### Step 2

[chemical structure]

[0539] A 200 mL pressure vessel was charged with 4-(5-(methylthio)-1H-tetrazol-1-yl)phenol (2.50 g, 11.4 mmol), tert-butyl 2-(2-(2-bromoethoxy)ethoxy)acetate (4.33 g, 14.8 mmol) and acetone (60 mL). Potassium carbonate was added (3.15 g, 22.8 mmol), and the vessel sealed and heated at 80° C. for 8 hours with vigorous stirring. The reaction mixture was cooled to room temperature and filtered to remove potassium carbonate, then washed with acetone/DCM/EtOAc (30 mL each). The filtrate was concentrated in vacuo to provide crude material, which was purified by flash chromatography (80 g, 100% DCM for 5 minutes, then gradient to 100% EtOAc over 20 minutes). The product tert-butyl 2-(2-(2-(4-(5-(methylthio)-1H-tetrazol-1-yl)phenoxy)ethoxy)ethoxy)acetate (3.98 g, 85% yield) was isolated as a white powder. LCMS—mz=411 (M+1).

### Step 3

[chemical structure]

[0540] Tert-butyl 2-(2-(2-(4-(5-(methylthio)-1H-tetrazol-1-yl)phenoxy)ethoxy)ethoxy)acetate (3.98 g, 9.21 mmol) was dissolved in ethanol (100 mL) and cooled to 5-10° C. in an ice-water bath, prior to the addition of 30% aqueous hydrogen peroxide (19.0 mL, 184 mmol), followed by ammonium molybdate (VI) tetrahydrate (1.14 g, 0.921 mmol). The reaction mixture was stirred at room temperature for 4 hours in an ice bath, then at room temperature for 12 hours. The mixture was diluted with DCM (150 mL) and then washed with brine. The organic phase was separated, dried over sodium sulfate and concentrated in vacuo to dryness. Purification by flash column chromatography (80 g silica, 100% DCM for 5 minutes, then gradient to 100% EtOAc over 20 minutes) provided 2-(2-(2-(4-(5-(methylsulfonyl)-1H-tetrazol-1-yl)phenoxy)ethoxy)ethoxy)acetic acid (MSPT Acid, 3.00 g, 80% yield) as a thick oil. LCMS—mz=385 (M−1)

### Step 4

[chemical structure]

[0541] 1-Hydroxypyrrolidine-2,5-dione (1.33 g, 1.6 Eq, 11.6 mmol) was added to a solution of 2-(2-(2-(4-(5-(methylsulfonyl)-1H-tetrazol-1-yl)phenoxy)ethoxy)ethoxy)acetic acid (2.80 g, 7.25 mmol) in DCM (50 mL) and THF (70 mL). EDCI (1.60 g, 10.3 mmol) was added in one portion, upon which the solution became a cloudy mixture. Additional DCM (20 mL) was added to bring the mixture into solution again, followed by stirring at room temperature for 12 hours. The solvent was removed in vacuo to provide crude material as a white foam. Purification by flash column chromatography (80 g, 100% DCM for 5 minutes, then gradient to 100% EtOAc over 20 minutes) afforded 2,5-dioxopyrrolidin-1-yl 2-(2-(2-(4-(5-(methylsulfonyl)-1H-tetrazol-1-yl)phenoxy)ethoxy)ethoxy)acetate (MSPT-NHS Ester, 2.61 g, 65% yield) as low melting solid. LCMS—mz=484 (M+1)

### Synthesis of 2,5-dioxopyrrolidin-1-yl 2-(2-(2-(4-(5-(methylsulfonyl)-1,3,4-oxadiazol-2-yl)phenoxy)ethoxy)ethoxy)acetate (OD-NHS Ester)

### Step 1

[chemical structure]

[0542] 4-(5-Mercapto-1,3,4-oxadiazol-2-yl)phenol (3.00 g, 15.4 mmol) was dissolved in THF (50 mL), and cooled to 0° C. in an ice water bath. N,N-Diisopropylethylamine (3.46 mL, 2.60 g, 20.1 mmol) was added, resulting in a cloudy solution. The mixture was stirred for 5 minutes in the ice bath, then iodomethane (2.85 g, 20.1 mmol) was added drop-wise via syringe over a period of 1 minute. Upon addition, the mixture turned clear after 5 minutes. The cooling bath was removed and the mixture stirred at room temperature for 2 hours, after which it was diluted with dichloromethane (100 mL) and washed with saturated aqueous NH4Cl (pH was adjusted to ˜5 by adding citric acid solution, 2×50 mL). The organic layer was separated, dried over sodium sulfate, and concentrated in vacuo to dryness to afford 4-(5-methylsulfanyl-1,3,4-oxadiazol-2-yl)phenol (520 mg, 97% yield) as a pale-yellow solid that was used in the next step without further purification. LC-MS—mz=209 (M+1).

### Step 2

[chemical structure]

[0543] 4-(5-(Methylthio)-1,3,4-oxadiazol-2-yl)phenol (3.3 g, 1 Eq, 15 mmol) and acetone (60 mL) were added to a 200 mL pressure vessel. To this solution was added tert-butyl 2-(2-(2-bromoethoxy)ethoxy)acetate (5.5 g, 20 mmol) and potassium carbonate (4.2 g, 30 mmol). The pressure vessel was sealed and heated at 70° C. for 5 hours with vigorous stirring. After cooling to room temperature, the mixture was filtered to remove solid potassium carbonate, washing with EtOAc/DCM. The filtrate was concentrated in vacuo to dryness and purified by normal phase flash column chromatography (80 g silica gold, 100% DCM for 5 minutes, then gradient to 100% EtOAc over 20 minutes). Product-containing fractions were concentrated in vacuo to afford tert-butyl 2-(2-(2-(4-(5-(methylthio)-1,3,4-oxadiazol-2-yl)phenoxy)ethoxy)ethoxy)acetate (4.8 g, 74% yield) as a white solid. LC-MS—mz=411 (M+1).

### Step 3

[chemical structure]

[0544] Tert-butyl 2-(2-(2-(4-(5-(methylthio)-1,3,4-oxadiazol-2-yl)phenoxy)ethoxy)ethoxy)acetate (5.20 g, 12.7 mmol) was dissolved in 100 mL of ethanol, and cooled to 5-10° C. in an ice-water bath, prior to the addition of 30% hydrogen peroxide (10 mL, 97 mmol), followed by ammonium molybdate (VI) tetrahydrate (501 mg, 0.405 mmol). After two hours of vigorous stirring, an additional 15 mL of 30% hydrogen peroxide and 1 g of Ammonium molybdate (VI) tetrahydrate were added. The reaction mixture was stirred for another 6 hours, then diluted with 150 mL of DCM, and washed with brine. The organic phase was separated, dried over sodium sulfate and concentrated in vacuo to dryness. The residue was triturated with methanol to provide an initial portion of the product. The solvent was then removed from the mother liquid under reduced pressure. Purification by flash column chromatography (40 g, 100% DCM for 3 minutes, then gradient to 100% EtOAc over 20 minutes) provided additional product as a white solid. Combination of both product portions yielded tert-butyl 2-(2-(2-(4-(5-(methylsulfonyl)-1,3,4-oxadiazol-2-yl)phenoxy)ethoxy)ethoxy)acetate (5.3 g, 90% yield) as a white solid. LC-MS—mz=387 (M-tBu).

### Step 4

[chemical structure]

[0545] To a solution of tert-butyl 2-(2-(2-(4-(5-(methylsulfonyl)-1,3,4-oxadiazol-2-yl)phenoxy)ethoxy)ethoxy)acetate (5.60 g, 12.0 mmol) in DCM (60 mL) was added 2,2,2-trifluoroacetic acid (20 mL, 12.0 mmol). The reaction mixture was stirred at room temperature for 2 hours then concentrated under vacuo to afford a thick residue, which was purified by normal phase flash column chromatography (80 g silica gold column, 100% DCM for 3 minutes, then gradient to 100% EtOAc over 20 minutes). Combination of product-containing fractions and concentration in vacuo yielded 2-(2-(2-(4-(5-(methylsulfonyl)-1,3,4-oxadiazol-2-yl)phenoxy)ethoxy)ethoxy)acetic acid (4.12 g, 82% yield). LCMS—mz=387 (M+1).

### Step 5

[chemical structure]

[0546] 2-(2-(2-(4-(5-(Methylsulfonyl)-1,3,4-oxadiazol-2-yl)phenoxy)ethoxy)ethoxy)acetic acid (3.00 g, 7.38 mmol) and 1-hydroxypyrrolidine-2,5-dione (1.19 g, 10.3 mmol) were dissolved in DCM (50 mL) and THF (70 mL). To this solution was added 3-(((ethylimino)methylene)amino)-N,N-dimethylpropan-1-amine (EDCI, 1.60 g, 10.3 mmol). Upon addition, the solution turned cloudy and additional DCM (20 mL) was added to bring the mixture into solution again, followed by stirring at room temperature for 12 hours. The reaction mixture was concentrated under reduced pressure, and the resulting residue dissolved in DCM purified by normal phase flash column chromatography (80 g silica gold 100% DCM for 5 minutes, then gradient to 100% EtOAc over 20 minutes). Concentration of product-containing fractions afforded 2,5-dioxopyrrolidin-1-yl-2-(2-(2-(4-(5-(methylsulfonyl)-1,3,4-oxadiazol-2-yl)phenoxy)ethoxy)ethoxy)acetate (2.61 g, 65% yield). LCMS—mz=484 (M+1).

### Fe Re-Bridging

[0547] The Fc is reduced by adding 1.5-2 eq. of freshly prepared TCEP stock in water. 258 μl of 7 mM TCEP solution is added to 9 mL of 111 μM Fc at pH 7.5. The solution was then incubated at 37° C. for 1 h and the reduction is verified by analyzing in LC-MS. Reduced Fc is then used directly for conjugation with the peptide. For efficient conjugation, the reaction is performed at 21.2 μM Fc concentration with a suitable excess (˜1.4 eq.) of the peptide, as follows: The reduced Fc (˜9 mL) is transferred to a 50 mL vial, to which 50 mM acetate buffer (˜29 mL) pH 5.6 and 6 mL of ACN are added. The solution is gently mixed and left at 4° C. before adding the peptide, as a 0.5 mM stock solution in 30% Acetonitrile in water. Reaction progress is monitored by LC-MS and typically completes within 30 minutes. To promote maleimide ring hydrolysis, the reactions is adjusted to pH 8.0 by addition of 1M Tris buffer at pH 8.0. The desired product is isolated after purification through IEX.

eCys Conjugation for Alternative Peptide Attachment Sites

[0548] The Fc with appropriate engineered cysteine was first reduced in the presence of 8-10 molar equivalents of dithiothreitol (DTT) for 2 hours at 37° C. Following reduction, the sample was passed through a Zeba spin desalting column (Thermo Fisher Scientific) or alternatively size exclusion chromatography to remove the reducing agent and cysteine or glutathione caps that were attached to the engineered cysteines during expression. Dehydroascorbic acid (DHAA), 1-5 molar equivalent was then added, and the sample was kept at room temperature for 0.5-1 hour to reform the hinge disulfide. Following oxidation, the sample was again passed through a Zeba spin column (Thermo Fisher Scientific), or alternatively a size exclusion chromatography column to remove the oxidizing agent and buffer exchange the sample into the desired buffer for conjugation.

eCys Conjugation for a Single Peptide

[0549] To generate an Fc with a single eCys site, a 1:1 mixture of an Fc with the desired site was mixed with the Fc containing the F405L and R409K mutations in the presence of 8-10 molar equivalents of dithiothreitol(DTT) and incubated at 37° C. for 2 hours. Following reduction, the reducing agent and cysteine or glutathione caps that were attached to the engineered cysteines during expression were removed using either a desalting column or size exclusion chromatography. Dehydroascorbic acid (DHAA), 1-5 molar equivalent was then added, and the sample was kept at room temperature for 0.5-1 hour to reform the hinge disulfide with the preference for hetero Fc formation driven by the F405L and R409K mutations in the one Fc molecule in the mixture. Following oxidation, the sample was again passed through a Zeba spin column (Thermo Fisher Scientific), or alternatively a size exclusion chromatography column to remove the oxidization agent and buffer exchange the sample into the desired buffer for conjugation.

Conjugation to Single or Double eCys Fc Constructs

[0550] For efficient conjugation to eCys variants, the reaction is performed at 21.2 μM Fc concentration with a suitable excess (˜1.4 eq for single eCys or ˜2.8Eq for double eCys) of the peptide, as follows: Fc (˜9 mL) is transferred to a 50 mL vial, to which 50 mM acetate buffer (˜29 mL) pH 5.6 and 6 mL of ACN are added. The solution is gently mixed and left at 4° C. before adding the peptide, as a 0.5 mM stock solution in 30% Acetonitrile in water. Reaction progress is monitored by LC-MS and typically completes within 30 minutes. To promote maleimide ring hydrolysis, the reactions is adjusted to pH 8.0 by addition of 1M Tris buffer at pH 8.0. The desired product is isolated after purification through IEX.

TABLE 3
Exemplary Therapeutic Polypeptide Fc conjugates

| | | | | | | Fc |
|---|---|---|---|---|---|---|
| | | | | Table 1 | Table 2 | region |
| Compound | Figure | (SEQ ID) | Therapeutic Polypeptide Fc Conjugates | (SEQ ID) | (SEQ ID) | (SEQ ID) |
| 1 | 2 | 459 | Y-Aib-EGT-αMeF(2F)-TSD-4Pal-SI-αMeL-LDEK(2-[2-(2-amino-ethoxy)- | 1 | 187 | 935 |
| | | | ethoxy]-acetyl)₂-(γGlu)-CO-(CH₂)₁₆-CO₂H)AQ-Aib-EFIe-αMeY- | | | |
| | | | LIEGSPSSGAPPPSK(PEG₂₄-BEA-MalDap₂-Fc)-NH₂ | | | |
| 2 | | 460 | Y-Aib-EGT-αMeF(2F)-TSD-4Pal-SI-αMeL-LD-Orn-K(2-[2-(2-amino- | 2 | 188 | 935 |
| | | | ethoxy)-ethoxy]-acetyl)₂-(γGlu)-CO-(CH₂)₁₆-CO₂H)AQ-Aib-EFIe-αMeY- | | | |
| | | | LIEGSPSSGAPPPSK(PEG₂₄-BEA-MalDap₂-Fc)-NH₂ | | | |
| 3 | | 461 | Y-Aib-EGT-αMeF(2F)-TSD-4Pal-SI-αMeL-LDEK(2-[2-(2-amino-ethoxy)- | 3 | 189 | 935 |
| | | | ethoxy]-acetyl)₂-(γGlu)-CO-(CH₂)₁₆-CO₂H)AQ-Aib-EFIe-αMeY- | | | |
| | | | LIEGGGGGGGSGGGGSGGGGSK(BEA-MalDap₂-Fc)-NH₂ | | | |
| 4 | | 462 | Y-Aib-EGT-αMeF(2F)-TSD-4Pal-SI-αMeL-LDEK(2-[2-(2-amino-ethoxy)- | 1 | 187 | 935 |
| | | | ethoxy]-acetyl)₂-(γGlu)-CO-(CH2)₁₆-CO₂H)AQ-Aib-EFIe-αMeY- | | | |
| | | | LIEGSPSSGAPPPSGGGGSK(BEA-MalDap₂-Fc)-NH₂ | | | |
| 5 | | 463 | Y-Aib-EGT-αMeF(2F)-TSD-4Pal-SI-αMeL-LDEK(2-[2-(2-amino-ethoxy)- | 1 | 187 | 935 |
| | | | cthoxy]-acetyl)₂-(γGlu)-CO-(CH₂)₁₆-CO₂H)AQ-Aib-EFIe-αMeY- | | | |
| | | | LIEGSPSSGAPPPS-(2-[2-(2-amino-ethoxy)-ethoxy]-acetyl)₈-K(BEA- | | | |
| | | | MalDap₂-Fc)-NH₂ | | | |
| 6 | | 464 | Y-Aib-EGT-αMeF(2F)-TSD-4Pal-SI-αMeL-LDEK(2-[2-(2-amino-ethoxy)- | 1 | 187 | 935 |
| | | | ethoxy]-acetyl)₂-(γGlu)-CO-(CH₂)₁₆-CO₂H)AQ-Aib-EFIe-αMeY- | | | |
| | | | LIEGSPSSGAPPPS-(2-[2-(2-amino-ethoxy)-ethoxy]-acetyl)₄-K(BEA- | | | |
| | | | MalDap2-Fc)-NH₂ | | | |
| 7 | | 465 | Y-Aib-EGT-αMeF(2F)-TSD-4Pal-SI-αMeL-LDEK(2-[2-(2-amino-ethoxy)- | 1 | 187 | 935 |
| | | | ethoxy]-acetyl)₂-(γGlu)-CO-(CH₂)₁₆-CO₂H)AQ-Aib-EFIe-αMeY- | | | |
| | | | LIEGSPSSGAPPPS-PEG₂₄-K(BEA-MalDap₂-Fc)-NH₂ | | | |
| 8 | | 466 | Y-Aib-EGT-αMeF(2F)-TSD-4Pal-SI-αMeL-LDEK(2-[2-(2-amino-ethoxy)- | 1 | 187 | 935 |
| | | | ethoxy]-acetyl)₂-(γGlu)-CO-(CH₂)₁₆-CO₂H)AQ-Aib-EFIe-αMeY- | | | |
| | | | LIEGSPSSGAPPPSK(2-[2-(2-amino-ethoxy)-ethoxy]-acetyl)₄-BEA- | | | |
| | | | MalDap₂-Fc)-NH₂ | | | |
| 9 | | 467 | Y-Aib-EGT-αMeF(2F)-TSD-4Pal-SI-αMeL-LDEK(2-[2-(2-amino-ethoxy)- | 1 | 187 | 935 |
| | | | ethoxy]-acetyl)₂-(γGlu)-CO-(CH₂)₁₆-CO₂H)AQ-Aib-EFIe-αMeY- | | | |
| | | | LIEGSPSSGAPPPSK(2-[2-(2-amino-ethoxy)-ethoxy]-acetyl)₄- | | | |
| | | | GPAPAPAPAPAPA-BEA-MalDap₂-Fc)-NH₂ | | | |
| 10 | | 468 | Y-Aib-EGT-αMeF(2F)-TSD-4Pal-SI-αMeL-LDEK(2-[2-(2-amino-ethoxy)- | 1 | 187 | 935 |
| | | | ethoxy]-acetyl)₂-(γGlu)-CO-(CH₂)₁₆-CO₂H)AQ-Aib-EFIe-αMeY- | | | |
| | | | LIEGSPSSGAPPPSK(2-[2-(2-amino-ethoxy)-ethoxy]-acetyl)₆- | | | |
| | | | GPAPAPAPAPAPA-BEA-MalDap₂-Fc)-NH₂ | | | |
| 11 | | 469 | Y-Aib-EGT-αMeF(2F)-TSD-4Pal-SI-αMeL-LDEK(2-[2-(2-amino-ethoxy)- | 1 | 187 | 935 |
| | | | ethoxy]-acetyl)₂-(γGlu)-CO-(CH₂)₁₆-CO₂H)AQ-Aib-EFIe-αMeY- | | | |
| | | | LIEGSPSSGAPPPSK(2-[2-(2-amino-ethoxy)-ethoxy]-acetyl)₄- | | | |
| | | | GPAPAPAPAPAPAPAPA-BEA-MalDap₂-Fc)-NH₂ | | | |
| 12 | | 470 | Y-Aib-EGT-αMeF(2F)-TSD-4Pal-SI-αMeL-LDEK(2-[2-(2-amino-ethoxy)- | 1 | 187 | 935 |
| | | | ethoxy]-acetyl)₂-(γGlu)-CO-(CH₂)₁₆-CO₂H)AQ-Aib-EFIe-αMeY- | | | |
| | | | LIEGSPSSGAPPPSK(GPAPAPAPAPAPAPAPA-BEA-MalDap₂-Fc)-NH₂ | | | |
| 13 | | 471 | Y-Aib-EGT-αMeF(2F)-TSD-4Pal-SI-αMeL-LDEK(2-[2-(2-amino-ethoxy)- | 1 | 187 | 935 |
| | | | ethoxy]-acetyl)₂-(γGlu)-CO-(CH₂)₁₆-CO₂H)AQ-Aib-EFIe-αMeY- | | | |
| | | | LIEGSPSSGAPPPSK(2-[2-(2-amino-ethoxy)-ethoxy]-acetyl)₄- | | | |
| | | | GKAAAEKAAAEKAAAE-BEA-MalDap₂-Fc)NH₂ | | | |
| 14 | | 472 | Y-Aib-EGT-αMeF(2F)-TSD-4Pal-SI-αMeL-LDEK(2-[2-(2-amino-ethoxy)- | 1 | 187 | 935 |
| | | | ethoxy]-acetyl)₂-(γGlu)-CO-(CH₂)₁₆-CO₂H)AQ-Aib-EFIe-αMeY- | | | |
| | | | LIEGSPSSGAPPPSK(LEAEAAAKEAAAKEAAAKEAAAKALE-BEA- | | | |
| | | | MalDap₂-Fc)-NH₂ | | | |
| 15 | | 473 | Y-Aib-EGT-αMeF(2F)-TSD-4Pal-SI-αMeL-LDEK(2-[2-(2-amino-ethoxy)- | 4 | 190 | 935 |
| | | | ethoxy]-acetyl)₂-(γGlu)-CO-(CH₂)₁₆-CO₂H)AQ-Aib-EFIE-αMeY- | | | |
| | | | LIEGSPSSGAPPPS-K(PEG₂₄-BEA-MalDap2-Fc)-NH₂ | | | |
| 16 | | 474 | Y-Aib-EGT-αMeF(2F)-TSD-4Pal-Aib-I-αMeL-LDEK(2-[2-(2-amino- | 5 | 191 | 935 |
| | | | ethoxy)-ethoxy]-acetyl)₂-(γGlu)-CO-(CH₂)₁₆-CO₂H)AQ-Aib-EFIE-αMeY- | | | |
| | | | LIEGSPSSGAPPPS-K(PEG₂₄-BEA-MalDap₂-Fc)-NH₂ | | | |
| 17 | | 475 | Y-Aib-EGT-αMeF(2F)-TSD-4Pal-Aib-S-αMeL-LDEK(2-[2-(2-amino- | 6 | 192 | 935 |
| | | | ethoxy)-ethoxy]-acetyl)₂-(γGlu)-CO-(CH₂)₁₆-CO₂H)AQ-Aib-EFIE-αMeY- | | | |
| | | | LIEGSPSSGAPPPS-K(PEG₂₄-BEA-MalDap₂-Fc)-NH₂ | | | |
| 18 | | 476 | Y-Aib-EGT-αMeF(2F)-TSD-4Pal-SI-αMeL-LEEK(2-[2-(2-amino-ethoxy)- | 7 | 193 | 935 |
| | | | ethoxy]-acetyl)₂-(γGlu)-CO-(CH₂)₁₆-CO₂H)AQ-Aib-EFIE-αMeY- | | | |
| | | | LIEGSPSSGAPPPS-K(PEG₂₄-BEA-MalDap₂-Fc)-NH₂ | | | |
| 19 | | 477 | Y-Aib-EGT-αMeF(2F)-TSDV-Aib-I-αMeL-LD-EK(2-[2-(2-amino-ethoxy)- | 8 | 194 | 935 |
| | | | ethoxy]-acetyl)₂-(γGlu)-CO-(CH₂)₁₆-CO₂H)AQ-Aib-EFIe-αMeY- | | | |
| | | | LIEGSPSSGAPPPS-K(PEG₂₄-BEA-MalDap₂-Fc)-NH₂ | | | |
| 20 | | 478 | Y-Aib-EGT-αMeF(2F)-TSDV-Aib-I-αMeL-LD-Orn-K(2-[2-(2-amino- | 9 | 195 | 935 |
| | | | ethoxy)-ethoxy]-acetyl)₂-(γGlu)-CO-(CH₂)₁₆-CO₂H)AQ-Aib-EFIe-αMeY- | | | |
| | | | LIEGSPSSGAPPPS-K(PEG₂₄-BEA-MalDap₂-Fc)-NH₂ | | | |
| 21 | | 479 | Y-Aib-EGT-αMeF(2F)-TSDV-Aib-I-αMeL-LD-Orn-K(2-[2-(2-amino- | 10 | 196 | 935 |
| | | | ethoxy)-ethoxy]-acetyl)₂-(γGlu)-CO-(CH₂)₁₆-CO₂H)AQ-Aib-EFIE-αMeY- | | | |
| | | | LIEGSPSSGAPPPS-K(PEG₂₄-BEA-MalDap₂-Fc)-NH₂ | | | |
| 22 | | 480 | Y-Aib-EGT-αMeF(2F)-TSD-4Pal-SI-αMeL-LDEK(2-[2-(2-amino-ethoxy)- | 11 | 197 | 935 |
| | | | ethoxy]-acetyl)₂-(γGlu)-CO-(CH₂)₁₆-CO₂H)AQ-Aib-EFIK(PEG₂₄-BEA- | | | |
| | | | MalDap₂-Fc)-αMeY-LIEGSPSSGAPPPSGS-NH₂ | | | |
| 23 | | 481 | Y-Aib-EGT-αMeF(2F)-TSD-4Pal-SI-αMeL-LDEK(2-[2-(2-amino-ethoxy)- | 12 | 198 | 935 |
| | | | ethoxy]-acetyl)₂-(γGlu)-CO-(CH₂)₁₆-CO₂H)AQ-Aib-EFIe-αMeY-LIK(PEG₂₄- | | | |
| | | | BEA-MalDap₂-Fc)GSPSSGAPPPSGS-NH₂ | | | |
| 24 | | 482 | Y-Aib-EGT-αMeF(2F)-TSD-4Pal-SI-αMeL-LDEK(2-[2-(2-amino-ethoxy)- | 3 | 189 | 935 |
| | | | ethoxy]-acetyl)₂-(γGlu)-CO-(CH₂)₁₆-CO₂H)AQ-Aib-EFIe-αMeY- | | | |
| | | | LIEGGGGGGGSGGGGSGGGGSGGGGSK(BEA-MalDap₂-Fc)-NH₂ | | | |
| 25 | | 483 | Y-Aib-EGT-αMeF(2F)-TSD-4Pal-SI-αMeL-LDEK(2-[2-(2-amino-ethoxy)- | 3 | 189 | 935 |
| | | | ethoxy]-acetyl)₂-(γGlu)-CO-(CH₂)₁₆-CO₂H)AQ-Aib-EFIe-αMeY- | | | |
| | | | LIEGGGGGGGSGGGGSGGGGSGGGGSGGGGSK(BEA-MalDap₂-Fc)- | | | |
| | | | NH₂ | | | |
| 26 | | 484 | Y-Aib-EGT-αMeF(2F)-TSD-4Pal-SI-αMeL-LDEK(2-[2-(2-amino-ethoxy)- | 13 | 199 | 935 |
| | | | ethoxy]-acetyl)₂-(γGlu)-CO-(CH₂)₁₆-CO₂H)AQ-Aib-EFIe-αMeY- | | | |
| | | | LIEGGPGGGGSGGGGSGGGGSK(BEA-MalDap₂-Fc)-NH₂ | | | |
| 27 | | 485 | Y-Aib-EGT-αMeF(2F)-TSD-4Pal-SI-αMeL-LDEK(2-[2-(2-amino-ethoxy)- | 14 | 200 | 935 |
| | | | ethoxy]-acetyl)₂-(γGlu)-CO-(CH₂)₁₆-CO₂H)AQ-Aib-EFIe-αMeY- | | | |
| | | | LIEGSPGGGGSGGGGSGGGGSK(BEA-MalDap₂-Fc)-NH₂ | | | |
| 28 | | 486 | Y-Aib-EGT-αMeF(2F)-TSD-4Pal-SI-αMeL-LDEK(2-[2-(2-amino-ethoxy)- | 3 | 189 | 935 |
| | | | ethoxy]-acetyl)₂-(γGlu)-CO-(CH₂)₁₆-CO₂H)AQ-Aib-EFIe-αMeY- | | | |
| | | | LIEGGGGGGGSGAPAPAPAPAPAPK(BEA-MalDap₂-Fc)-NH₂ | | | |
| 29 | | 487 | Y-Aib-EGT-αMeF(2F)-TSD-4Pal-SI-αMeL-LDEK(2-[2-(2-amino-ethoxy)- | 3 | 189 | 935 |
| | | | ethoxy]-acetyl)₂-(γGlu)-CO-(CH₂)₁₆-CO₂H)AQ-Aib-EFIe-αMeY- | | | |
| | | | LIEGGGGGGGSGGGGSGAPAPAPAPAPAPK(BEA-MalDap₂-Fc)-NH₂ | | | |
| 30 | | 488 | Y-Aib-EGT-αMeF(2F)-TSD-4Pal-SI-αMeL-LDEK(2-[2-(2-amino-ethoxy)- | 3 | 189 | 935 |
| | | | ethoxy]-acetyl)₂-(γGlu)-CO-(CH₂)₁₆-CO₂H)AQ-Aib-EFIe-αMeY- | | | |
| | | | LIEGGGGGGGSGEAAAKEAAAKEAAAKK(BEA-MalDap₂-Fc)-NH₂ | | | |
| 31 | | 489 | Y-Aib-EGT-αMeF(2F)-TSD-4Pal-SI-αMeL-LDEK(2-[2-(2-amino-ethoxy)- | 3 | 189 | 935 |
| | | | ethoxy]-acetyl)₂-(γGlu)-CO-(CH₂)₁₆-CO₂H)AQ-Aib-EFIe-αMeY- | | | |
| | | | LIEGGGGGGGSGGGGSGEAAAKEAAAKEAAAKK(BEA-MalDap₂-Fc)- | | | |
| | | | NH₂ | | | |
| 32 | 3 | 490 | Y-Aib-EGT-αMeF(2F)-TSD-4Pal-SI-αMeL-LD-Orn-K(ϵKϵK-(γGlu)-CO- | 2 | 258 | 935 |
| | | | (CH₂)₁₆-CO₂H)AQ-Aib-EFIe-αMeY-LIEGSPSSGAPPPSK(PEG₂₄-BEA- | | | |
| | | | MalDap₂-Fc)-NH₂ | | | |
| 33 | | 491 | Y-Aib-EGT-αMeF(2F)-TSD-4Pal-SI-αMeL-LDEK(ϵKϵK-(γGlu)-CO- | 1 | 201 | 935 |
| | | | (CH₂)₁₆-CO₂H)AQ-Aib-EFIe-αMeY-LIEGSPSSGAPPPSK(PEG₂₄-BEA- | | | |
| | | | MalDap₂-Fc)-NH₂ | | | |
| 34 | | 492 | Y-Aib-EGT-αMeF(2F)-TSD-4Pal-SI-αMeL-LDEK(2-[2-(2-amino-ethoxy)- | 3 | 189 | 935 |
| | | | ethoxy]-acetyl)₂-(γGlu)-CO-(CH₂)₁₆-CO₂H)AQ-Aib-EFIe-αMeY- | | | |
| | | | LIEGGGGGGGSGAPAPAPAPK(BEA-MalDap₂-Fc)-NH₂ | | | |
| 35 | | 493 | Y-Aib-EGT-αMeF(2F)-TSD-4Pal-SI-αMeL-LDEK(2-[2-(2-amino-ethoxy)- | 3 | 189 | 935 |
| | | | ethoxy]-acetyl)₂-(γGlu)-CO-(CH₂)₁₆-CO₂H)AQ-Aib-EFIe-αMeY- | | | |
| | | | LIEGGGGGGGSGGGGSGGGGSGAPAPAPK(BEA-MalDap₂-Fc)-NH₂ | | | |
| 36 | | 494 | Y-Aib-EGT-αMeF(2F)-TSD-4Pal-SI-αMeL-LDEK(2-[2-(2-amino-ethoxy)- | 3 | 189 | 935 |
| | | | ethoxy]-acetyl)₂-(γGlu)-CO-(CH₂)₁₆-CO₂H)AQ-Aib-EFIe-αMeY- | | | |
| | | | LIEGGGGGGGSGGGGSGGGGSGGGGSGAPAPAPK(BEA-MalDap₂-Fc)- | | | |
| | | | NH₂ | | | |
| 37 | | 495 | Y-Aib-EGT-αMeF(2F)-TSD-4Pal-SI-αMeL-LDEK(2-[2-(2-amino-ethoxy)- | 3 | 189 | 935 |
| | | | ethoxy]-acetyl)₂-(γGlu)-CO-(CH₂)₁₆-CO₂H)AQ-Aib-EFIe-αMeY- | | | |
| | | | LIEGGGGGGGSGGGGSEAAAKEAAAKEAAAKEAAAKK(BEA- | | | |
| | | | MalDap₂-Fc)-NH₂ | | | |
| 38 | | 496 | Y-Aib-EGT-αMeF(2F)-TSD-4Pal-SI-αMeL-LDEK(2-[2-(2-amino-ethoxy)- | 3 | 189 | 935 |
| | | | ethoxy]-acetyl)₂-(γGlu)-CO-(CH₂)₁₆-CO₂H)AQ-Aib-EFIe-αMeY- | | | |
| | | | LIEGGGGGGGSGGGGSGGGGSGEAAAKEAAAKEAAAKK(BEA- | | | |
| | | | MalDap₂-Fc)-NH₂ | | | |
| 39 | | 497 | Y-Aib-EGT-αMeF(2F)-TSD-4Pal-SI-αMeL-LDEK(2-[2-(2-amino-ethoxy)- | 3 | 189 | 935 |
| | | | ethoxy]-acetyl)₂-(γGlu)-CO-(CH₂)₁₆-CO₂H)AQ-Aib-EFIe-αMeY- | | | |
| | | | LIEGGGGGGGSGGGGSGGGGSGGGGSGEAAAKEAAAKEAAAKK(BEA- | | | |
| | | | MalDap₂-Fc)-NH₂ | | | |
| 40 | | 498 | Y-Aib-EGT-αMeF(2F)-TSD-4Pal-SI-αMeL-LDEK(2-[2-(2-amino-ethoxy)- | 15 | 202 | 935 |
| | | | ethoxy]-acetyl)₂-(γGlu)-CO-(CH₂)₁₆-CO₂H)AQ-Aib-EFIE-αMeY- | | | |
| | | | LIEGGGGGGGSGGGGSGGGGSK(BEA-MalDap₂-Fc)-NH₂ | | | |
| 41 | | 499 | Y-Aib-EGT-αMeF(2F)-TSD-4Pal-Aib-I-αMeL-LDEK(2-[2-(2-amino- | 16 | 203 | 935 |
| | | | ethoxy)-ethoxy]-acetyl)₂-(γGlu)-CO-(CH₂)₁₆-CO₂H)AQ-Aib-EFIE-αMeY- | | | |
| | | | LIEGGGGGGGSGGGGSGGGGSK(BEA-MalDap₂-Fc)-NH₂ | | | |
| 42 | | 500 | Y-Aib-EGT-αMeF(2F)-TSD-4Pal-SI-αMeL-LEEK(2-[2-(2-amino-ethoxy)- | 17 | 204 | 935 |
| | | | ethoxy]-acetyl)₂-(γGlu)-CO-(CH₂)₁₆-CO₂H)AQ-Aib-EFIE-αMeY- | | | |
| | | | LIEGGGGGGGSGGGGSGGGGSK(BEA-MalDap₂-Fc)-NH₂ | | | |
| 43 | | 501 | Y-Aib-EGT-αMeF(2F)-TSD-V-Aib-I-αMeL-LDEK(2-[2-(2-amino-ethoxy)- | 18 | 205 | 935 |
| | | | ethoxy]-acetyl)₂-(γGlu)-CO-(CH₂)₁₆-CO₂H)AQ-Aib-EFIe-αMeY- | | | |
| | | | LIEGGGGGGGSGGGGSGGGGSK(BEA-MalDap₂-Fc)-NH₂ | | | |
| 44 | | 502 | Y-Aib-EGT-αMeF(2F)-TSD-V-Aib-I-αMeL-LD-Orn-K(2-[2-(2-amino- | 19 | 206 | 935 |
| | | | ethoxy)-ethoxy]-acetyl)₂-(γGlu)-CO-(CH₂)₁₆-CO₂H)AQ-Aib-EFIe-αMeY- | | | |
| | | | LIEGGGGGGGSGGGGSGGGGSK(BEA-MalDap₂-Fc)-NH₂ | | | |
| 45 | | 503 | Y-Aib-EGT-αMeF(2F)-TSD-V-Aib-I-αMeL-LD-Orn-K(2-[2-(2-amino- | 20 | 207 | 935 |
| | | | ethoxy)-ethoxy]-acetyl)₂-(γGlu)-CO-(CH₂)₁₆-CO₂H)AQ-Aib-EFIE-αMeY- | | | |
| | | | LIEGGGGGGGSGGGGSGGGGSK(BEA-MalDap₂-Fc)-NH₂ | | | |
| 46 | | 504 | Y-Aib-EGT-αMeF(2F)-TSD-4Pal-SI-αMeL-LD-Orn-K(2-[2-(2-amino- | 21 | 208 | 935 |
| | | | ethoxy)-ethoxy]-acetyl)₂-(γGlu)-CO-(CH₂)₁₆-CO₂H)AQ-Aib-EFIE-αMeY- | | | |
| | | | LIEGGGGGGGSGGGGSGGGGSK(BEA-MalDap₂-Fc)-NH₂ | | | |
| 47 | 4 | 505 | Y-Aib-EGT-αMeF(2F)-TSD-4Pal-Aib-I-αMeL-LD-Orn-K(2-[2-(2-amino- | 22 | 209 | 935 |
| | | | ethoxy)-ethoxy]-acetyl)₂-(γGlu)-CO-(CH₂)₁₆-CO₂H)AQ-Aib-EFIE-αMeY- | | | |
| | | | LIEGGGGGGGSGGGGSGGGGSK(BEA-MalDap₂-Fc)-NH₂ | | | |
| 48 | | 506 | Y-Aib-EGT-αMeF(2F)-TSD-4Pal-SI-αMeL-LE-Orn-K(2-[2-(2-amino- | 23 | 210 | 935 |
| | | | ethoxy)-ethoxy]-acetyl)₂-(γGlu)-CO-(CH₂)₁₆-CO₂H)AQ-Aib-EFIE-αMeY- | | | |
| | | | LIEGGGGGGGSGGGGSGGGGSK(BEA-MalDap₂-Fc)-NH₂ | | | |
| 49 | | 507 | Y-Aib-EGT-αMeF(2F)-TSD-4Pal-SI-αMeL-LDEK(2-[2-(2-amino-ethoxy)- | 3 | 189 | 935 |
| | | | ethoxy]-acetyl)₂-(γGlu)-CO-(CH₂)₁₆-CO₂H)AQ-Aib-EFIe-αMeY- | | | |
| | | | LIEGGGGGGGSGGGGSGAPAPAPAPAPAPAPAPK(BEA-MalDap₂-Fc)- | | | |
| | | | NH₂ | | | |
| 50 | | 508 | Y-Aib-EGT-αMeF(2F)-TSD-4Pal-SI-αMeL-LDEK(2-[2-(2-amino-ethoxy)- | 3 | 189 | 935 |
| | | | ethoxy]-acetyl)₂-(γGlu)-CO-(CH₂)₁₆-CO₂H)AQ-Aib-EFIe-αMeY- | | | |
| | | | LIEGGGGGGGSGGGGSGGGGSGAPAPAPAPAPAPK(BEA-MalDap₂-Fc)- | | | |
| | | | NH₂ | | | |
| 51 | | 509 | Y-Aib-EGT-αMeF(2F)-TSD-4Pal-SI-αMeL-LDEK(2-[2-(2-amino-ethoxy)- | 3 | 189 | 935 |
| | | | ethoxy]-acetyl)₂-(γGlu)-CO-(CH₂)₁₆-CO₂H)AQ-Aib-EFIe-αMeY- | | | |
| | | | LIEGGGGGGGSGGGGSGGGGSGGGGSGAPAPAPAPAPAPK(BEA- | | | |
| | | | MalDap₂-Fc)-NH₂ | | | |
| 52 | | 510 | Y-Aib-EGT-αMeF(2F)-TSD-4Pal-SI-αMeL-LDEK(2-[2-(2-amino-ethoxy)- | 15 | 202 | 935 |
| | | | ethoxy]-acetyl)₂-(γGlu)-CO-(CH₂)₁₆-CO₂H)AQ-Aib-EFIE-αMeY- | | | |
| | | | LIEGGGGGGGQGGGGQGGGGQK(BEA-MalDap₂-Fc)-NH₂ | | | |
| 53 | | 511 | Y-Aib-EGT-αMeF(2F)-TSD-4Pal-SI-αMeL-LDEK(2-[2-(2-amino-ethoxy)- | 15 | 202 | 935 |
| | | | ethoxy]-acetyl)₂-(γGlu)-CO-(CH₂)₁₆-CO₂H)AQ-Aib-EFIE-αMeY- | | | |
| | | | LIEGGGGGGGQGGGGQGGGGQGGGGQK(BEA-MalDap₂-Fc)-NH₂ | | | |
| 54 | | 512 | Y-Aib-EGT-αMeF(2F)-TSD-4Pal-SI-αMeL-LDEK(2-[2-(2-amino-ethoxy)- | 15 | 202 | 935 |
| | | | ethoxy]-acetyl)₂-(γGlu)-CO-(CH₂)₁₆-CO₂H)AQ-Aib-EFIE-αMeY- | | | |
| | | | LIEGGGGGGGQGGGGQGGGGQGGGGQGGGGQK(BEA-MalDap₂-Fc)- | | | |
| | | | NH₂ | | | |
| 55 | | 513 | Y-Aib-EGT-αMeF(2F)-TSD-4Pal-SI-αMeL-LDEK(2-[2-(2-amino-ethoxy)- | 11 | 197 | 935 |
| | | | ethoxy]-acetyl)₂-(γGlu)-CO-(CH₂)₁₆-CO₂H)AQ-Aib-EFIK(2-[2-(2-amino- | | | |
| | | | ethoxy)-ethoxy]-acetyl)₄-BEA-MalDap₂-Fc)-αMeY-LIEGSPSSGAPPPSGS- | | | |
| | | | NH₂ | | | |
| 56 | | 514 | Y-Aib-EGT-αMeF(2F)-TSD-4Pal-SI-αMeL-LDEK(2-[2-(2-amino-ethoxy)- | 24 | 211 | 935 |
| | | | ethoxy]-acetyl)₂-(γGlu)-CO-(CH₂)₁₆-CO₂H)AQ-Aib-EFIE-αMeY-LIK(2-12- | | | |
| | | | (2-amino-ethoxy)-ethoxy]-acetyl)₄-BEA-MalDap₂-Fc)GSPSSGAPPPSGS- | | | |
| | | | NH₂ | | | |
| 57 | | 515 | Y-Aib-EGT-αMeF(2F)-TSD-4Pal-SI-αMeL-LDEK(2-[2-(2-amino-ethoxy)- | 24 | 211 | 935 |
| | | | ethoxy]-acetyl)₂-(γGlu)-CO-(CH₂)₁₆-CO₂H)AQ-Aib-EFIE-αMeY- | | | |
| | | | LIK(GGGGSGGGGSGGGGSGGGGSG-BEA-MalDap₂- | | | |
| | | | Fc)GSPSSGAPPPSGS-NH₂ | | | |
| 58 | | 516 | Y-Aib-EGT-αMeF(2F)-TSD-4Pal-SI-αMeL-LDEK(2-[2-(2-amino-ethoxy)- | 15 | 202 | 935 |
| | | | ethoxy]-acetyl)₂-(γGlu)-CO-(CH₂)₁₆-CO₂H)AQ-Aib-EFIE-αMeY- | | | |
| | | | LIEGGGGGGGSGAPAPAPAPAPAPK(BEA-MalDap₂-Fc)-NH₂ | | | |
| 59 | | 517 | Y-Aib-EGT-αMeF(2F)-TSD-4Pal-SI-αMeL-LDEK(2-[2-(2-amino-ethoxy)- | 15 | 202 | 935 |
| | | | ethoxy]-acetyl)₂-(γGlu)-CO-(CH₂)₁₆-CO₂H)AQ-Aib-EFIE-αMeY- | | | |
| | | | LIEGGGGGGGSGGGGSGGGGSGAPAPAPAPAPAPK(BEA-MalDap₂-Fc)- | | | |
| | | | NH₂ | | | |
| 60 | | 518 | Y-Aib-EGT-αMeF(2F)-TSD-4Pal-SI-αMeL-LDEK(2-[2-(2-amino-ethoxy)- | 15 | 202 | 935 |
| | | | ethoxy]-acetyl)₂-(γGlu)-CO-(CH₂)₁₆-CO₂H)AQ-Aib-EFIE-αMeY- | | | |
| | | | LIEGGGGGGGSGEAAAKEAAAKEAAAKK(BEA-MalDap₂-Fc)-NH₂ | | | |
| 61 | | 519 | Y-Aib-EGT-αMeF(2F)-TSD-4Pal-SI-αMeL-LDEK(2-[2-(2-amino-ethoxy)- | 15 | 202 | 935 |
| | | | ethoxy]-acetyl)₂-(γGlu)-CO-(CH₂)₁₆-CO₂H)AQ-Aib-EFIE-αMeY- | | | |
| | | | LIEGGGGGGGSGGGGSGGGGSGEAAAKEAAAKEAAAKK(BEA- | | | |
| | | | MalDap₂-Fc)-NH₂ | | | |
| 62 | | 520 | Y-Aib-EGT-αMeF(2F)-TSD-4Pal-Aib-I-αMeL-LDEK(2-[2-(2-amino- | 16 | 203 | 935 |
| | | | ethoxy)-ethoxy]-acetyl)₂-(γGlu)-CO-(CH₂)₁₆-CO₂H)AQ-Aib-EFIE-αMeY- | | | |
| | | | LIEGGGGGGGSGAPAPAPAPAPAPK(BEA-MalDap₂-Fc)-NH₂ | | | |
| 63 | | 521 | Y-Aib-EGT-αMeF(2F)-TSD-4Pal-Aib-I-αMeL-LDEK(2-[2-(2-amino- | 16 | 203 | 935 |
| | | | ethoxy)-ethoxy]-acetyl)₂-(γGlu)-CO-(CH₂)₁₆-CO₂H)AQ-Aib-EFIE-αMeY- | | | |
| | | | LIEGGGGGGGSGGGGSGGGGSGAPAPAPAPAPAPK(BEA-MalDap₂-Fc)- | | | |
| | | | NH₂ | | | |
| 64 | | 522 | Y-Aib-EGT-αMeF(2F)-TSD-4Pal-Aib-I-αMeL-LDEK(2-[2-(2-amino- | 16 | 203 | 935 |
| | | | ethoxy)-ethoxy]-acetyl)₂-(γGlu)-CO-(CH₂)₁₆-CO₂H)AQ-Aib-EFIE-αMeY- | | | |
| | | | LIEGGGGGGGSGEAAAKEAAAKEAAAKK(BEA-MalDap₂-Fc)-NH₂ | | | |
| 65 | | 523 | Y-Aib-EGT-αMeF(2F)-TSD-4Pal-Aib-I-αMeL-LDEK(2-[2-(2-amino- | 16 | 203 | 935 |
| | | | ethoxy)-ethoxy]-acetyl)₂-(γGlu)-CO-(CH₂)₁₆-CO₂H)AQ-Aib-EFIE-αMeY- | | | |
| | | | LIEGGGGGGGSGGGGSGGGGSGEAAAKEAAAKEAAAKK(BEA- | | | |
| | | | MalDap₂-Fc)-NH₂ | | | |
| 66 | | 524 | Y-Aib-EGT-αMeF(2F)-TSD-4Pal-SI-αMeL-LEEK(2-[2-(2-amino-ethoxy)- | 17 | 204 | 935 |
| | | | ethoxy]-acetyl)₂-(γGlu)-CO-(CH₂)₁₆-CO₂H)AQ-Aib-EFIE-αMeY- | | | |
| | | | LIEGGGGGGGSGAPAPAPAPAPAPK(BEA-MalDap₂-Fc)-NH₂ | | | |
| 67 | | 525 | Y-Aib-EGT-αMeF(2F)-TSD-4Pal-SI-αMeL-LEEK(2-[2-(2-amino-ethoxy)- | 17 | 204 | 935 |
| | | | ethoxy]-acetyl)₂-(γGlu)-CO-(CH₂)₁₆-CO₂H)AQ-Aib-EFIE-αMeY- | | | |
| | | | LIEGGGGGGGSGGGGSGGGGSGAPAPAPAPAPAPK(BEA-MalDap₂-Fc)- | | | |
| | | | NH₂ | | | |
| 68 | | 526 | Y-Aib-EGT-αMeF(2F)-TSD-4Pal-SI-αMeL-LEEK(2-[2-(2-amino-ethoxy)- | 17 | 204 | 935 |
| | | | ethoxy]-acetyl)₂-(γGlu)-CO-(CH₂)₁₆-CO₂H)AQ-Aib-EFIE-αMeY- | | | |
| | | | LIEGGGGGGGSGEAAAKEAAAKEAAAKK(BEA-MalDap₂-Fc)-NH₂ | | | |
| 69 | | 527 | Y-Aib-EGT-αMeF(2F)-TSD-4Pal-SI-αMeL-LEEK(2-[2-(2-amino-ethoxy)- | 17 | 204 | 935 |
| | | | ethoxy]-acetyl)₂-(γGlu)-CO-(CH₂)₁₆-CO₂H)AQ-Aib-EFIE-αMeY- | | | |
| | | | LIEGGGGGGGSGGGGSGGGGSGEAAAKEAAAKEAAAKK(BEA- | | | |
| | | | MalDap₂-Fc)-NH₂ | | | |
| 70 | | 528 | Y-Aib-EGT-αMeF(2F)-TSD-4Pal-SI-αMeL-LE-Orn-K(2-[2-(2-amino- | 23 | 210 | 935 |
| | | | ethoxy)-ethoxy]-acetyl)₂-(γGlu)-CO-(CH₂)₁₆-CO₂H)AQ-Aib-EFIE-αMeY- | | | |
| | | | LIEGGGGGGGSGAPAPAPAPAPAPK(BEA-MalDap2-Fc)-NH₂ | | | |
| 71 | | 529 | Y-Aib-EGT-αMeF(2F)-TSD-4Pal-SI-αMeL-LE-Orn-K(2-[2-(2-amino- | 23 | 210 | 935 |
| | | | ethoxy)-ethoxy]-acetyl)₂-(γGlu)-CO-(CH₂)₁₆-CO₂H)AQ-Aib-EFIE-αMeY- | | | |
| | | | LIEGGGGGGGSGGGGSGGGGSGAPAPAPAPAPAPK(BEA-MalDap₂-Fc)- | | | |
| | | | NH₂ | | | |
| 72 | | 530 | Y-Aib-EGT-αMeF(2F)-TSD-4Pal-SI-αMeL-LE-Orn-K(2-[2-(2-amino- | 23 | 210 | 935 |
| | | | ethoxy)-ethoxy]-acetyl)₂-(γGlu)-CO-(CH₂)₁₆-CO₂H)AQ-Aib-EFIE-αMeY- | | | |
| | | | LIEGGGGGGGSGEAAAKEAAAKEAAAKK(BEA-MalDap₂-Fc)-NH₂ | | | |
| 73 | | 531 | Y-Aib-EGT-αMeF(2F)-TSD-4Pal-SI-αMeL-LDEK(2-[2-(2-amino-ethoxy)- | 3 | 189 | 935 |
| | | | ethoxy]-acetyl)₂-(γGlu)-CO-(CH₂)₁₆-CO₂H)AQ-Aib-EFIe-αMeY- | | | |
| | | | LIEGGGAPAPAPAPAPAPGGGGSGGGGSK(BEA-MalDap₂-Fc)-NH₂ | | | |
| 74 | | 532 | Y-Aib-EGT-αMeF(2F)-TSD-4Pal-SI-αMeL-LDEK(2-[2-(2-amino-ethoxy)- | 11 | 197 | 935 |
| | | | ethoxy]-acetyl)₂-(γGlu)-CO-(CH₂)₁₆-CO₂H)AQ-Aib- | | | |
| | | | EFIK(SGGGGSGGGGSGGGGGPAPAPAPAPAPAG-BEA-MalDap₂-Fc)- | | | |
| | | | αMeY-LIEGSPSSGAPPPSGS-NH₂ | | | |
| 75 | | 533 | Y-Aib-EGT-αMeF(2F)-TSD-4Pal-SI-αMeL-LDEK(2-[2-(2-amino-ethoxy)- | 11 | 197 | 935 |
| | | | ethoxy]-acetyl)₂-(γGlu)-CO-(CH₂)₁₆-CO₂H)AQ-Aib- | | | |
| | | | EFIK(SGGGGSGGGGSGGGGGKAAAEKAAAEKAAAEG-BEA-MalDap₂- | | | |
| | | | Fc)-αMeY-LIEGSPSSGAPPPSGS-NH₂ | | | |
| 76 | | 534 | Y-Aib-EGT-αMeF(2F)-TSD-4Pal-SI-αMeL-LDEK(2-[2-(2-amino-ethoxy)- | 24 | 211 | 935 |
| | | | ethoxy]-acetyl)₂-(γGlu)-CO-(CH₂)₁₆-CO₂H)AQ-Aib-EFIE-αMeY- | | | |
| | | | LIK(SGGGGSGGGGSGGGGGPAPAPAPAPAPAG-BEA-MalDap₂- | | | |
| | | | Fc)GSPSSGAPPPSGS-NH₂ | | | |
| 77 | | 535 | Y-Aib-EGT-αMeF(2F)-TSD-4Pal-SI-αMeL-LDEK(2-[2-(2-amino-ethoxy)- | 24 | 211 | 935 |
| | | | ethoxy]-acetyl)₂-(γGlu)-CO-(CH₂)₁₆-CO₂H)AQ-Aib-EFIE-αMeY- | | | |
| | | | LIK(SGGGGSGGGGSGGGGGKAAAEKAAAEKAAAEG-BEA-MalDap₂- | | | |
| | | | Fc)GSPSSGAPPPSGS-NH₂ | | | |
| 78 | | 536 | Y-Aib-EGT-αMeF(2F)-TSD-4Pal-SI-αMeL-LDEK(2-[2-(2-amino-ethoxy)- | 1 | 187 | 935 |
| | | | ethoxy]-acetyl)₂-(γGlu)-CO-(CH₂)₁₆-CO₂H)AQ-Aib-EFIe-αMeY- | | | |
| | | | LIEGSPSSGAPPPSK(2-[2-(2-amino-ethoxy)-ethoxy]-acetyl)₄- | | | |
| | | | GPKPKPKPKPKPK-BEA-MalDap₂-Fc)-NH₂ | | | |
| 79 | | 537 | Y-Aib-EGT-αMeF(2F)-TSD-4Pal-SI-αMeL-LDEK(2-[2-(2-amino-ethoxy)- | 1 | 187 | 935 |
| | | | ethoxy]-acetyl)₂-(γGlu)-CO-(CH₂)₁₆-CO₂H)AQ-Aib-EFIe-αMeY- | | | |
| | | | LIEGSPSSGAPPPSK(2-[2-(2-amino-ethoxy)-ethoxy]-acetyl)₄- | | | |
| | | | GPEPEPEPEPEPE-BEA-MalDap₂-Fc)-NH₂ | | | |
| 80 | | 538 | Y-Aib-EGT-αMeF(2F)-TSD-4Pal-SI-αMeL-LEEK(2-[2-(2-amino-ethoxy)- | 17 | 204 | 935 |
| | | | ethoxy]-acetyl)₂-(γGlu)-CO-(CH₂)₁₆-CO₂H)AQ-Aib-EFIE-αMeY- | | | |
| | | | LIEGGGGGGGSGEPEPEPEPEPEPK(BEA-MalDap₂-Fc)-NH₂ | | | |
| 81 | | 539 | Y-Aib-EGT-αMeF(2F)-TSD-4Pal-SI-αMeL-LEEK(2-[2-(2-amino-ethoxy)- | 17 | 204 | 935 |
| | | | ethoxy]-acetyl)₂-(γGlu)-CO-(CH₂)₁₆-CO₂H)AQ-Aib-EFIE-αMeY- | | | |
| | | | LIEGGGGGGGSGGGGSGGGGSGEPEPEPEPEPEPK(BEA-MalDap₂-Fc)- | | | |
| | | | NH₂ | | | |
| 82 | | 540 | Y-Aib-EGT-αMeF(2F)-TSD-4Pal-SI-αMeL-LEEK(2-[2-(2-amino-ethoxy)- | 17 | 204 | 935 |
| | | | ethoxy]-acetyl)₂-(γGlu)-CO-(CH₂)₁₆-CO₂H)AQ-Aib-EFIE-αMeY- | | | |
| | | | LIEGGGGGGGQGGGGQGGGGQGEPEPEPEPEPEPK(BEA-MalDap₂-Fc)- | | | |
| | | | NH₂ | | | |
| 83 | | 541 | Y-Aib-EGT-αMeF(2F)-TSD-4Pal-SI-αMeL-LE-Orn-K(2-[2-(2-amino- | 23 | 210 | 935 |
| | | | ethoxy)-ethoxy]-acetyl)₂-(γGlu)-CO-(CH₂)₁₆-CO₂H)AQ-Aib-EFIE-αMeY- | | | |
| | | | LIEGGGGGGGSGEPEPEPEPEPEPK(BEA-MalDap₂-Fc)-NH₂ | | | |
| 84 | | 542 | Y-Aib-EGT-αMeF(2F)-TSD-4Pal-SI-αMeL-LE-Orn-K(2-[2-(2-amino- | 23 | 210 | 935 |
| | | | ethoxy)-ethoxy]-acetyl)₂-(γGlu)-CO-(CH₂)₁₆-CO₂H)AQ-Aib-EFIE-αMeY- | | | |
| | | | LIEGGGGGGGSGGGGSGGGGSGEPEPEPEPEPEPK(BEA-MalDap₂-Fc)- | | | |
| | | | NH₂ | | | |
| 85 | | 543 | Y-Aib-EGT-αMeF(2F)-TSD-4Pal-SI-αMeL-LE-Orn-K(2-[2-(2-amino- | 23 | 210 | 935 |
| | | | ethoxy)-ethoxy]-acetyl)₂-(γGlu)-CO-(CH₂)₁₆-CO₂H)AQ-Aib-EFIE-αMeY- | | | |
| | | | LIEGGGGGGGQGGGGQGGGGQGEPEPEPEPEPEPK(BEA-MalDap₂-Fc)- | | | |
| | | | NH₂ | | | |
| 86 | | 544 | Y-Aib-EGT-αMeF(2F)-TSD-4Pal-SI-αMeL-LEEK(2-[2-(2-amino-ethoxy)- | 7 | 193 | 935 |
| | | | ethoxy]-acetyl)₂-(γGlu)-CO-(CH₂)₁₆-CO₂H)AQ-Aib-EFIE-αMeY- | | | |
| | | | LIEGSPSSGAPPPS-(2-[2-(2-amino-ethoxy)-ethoxy]-acetyl)₂- | | | |
| | | | GEPEPEPEPEPEPK(BEA-MalDap₂-Fc)-NH₂ | | | |
| 87 | | 545 | Y-Aib-EGT-αMeF(2F)-TSD-4Pal-SI-αMeL-LEEK(2-[2-(2-amino-ethoxy)- | 7 | 193 | 935 |
| | | | ethoxy]-acetyl)₂-(γGlu)-CO-(CH₂)₁₆-CO₂H)AQ-Aib-EFIE-αMeY- | | | |
| | | | LIEGSPSSGAPPPS-(2-[2-(2-amino-ethoxy)-ethoxy]-acetyl)₄- | | | |
| | | | GEPEPEPEPEPEPK(BEA-MalDap₂-Fc)-NH₂ | | | |
| 88 | | 546 | Y-Aib-EGT-αMeF(2F)-TSD-4Pal-SI-αMeL-LE-Orn-K(2-[2-(2-amino- | 25 | 212 | 935 |
| | | | ethoxy)-ethoxy]-acetyl)₂-(γGlu)-CO-(CH₂)₁₆-CO₂H)AQ-Aib-EFIE-αMeY- | | | |
| | | | LIEGSPSSGAPPPS-(2-[2-(2-amino-ethoxy)-ethoxy]-acetyl)₂- | | | |
| | | | GEPEPEPEPEPEPK(BEA-MalDap₂-Fc)-NH₂ | | | |
| 89 | | 547 | Y-Aib-EGT-αMeF(2F)-TSD-4Pal-SI-αMeL-LE-Orn-K(2-[2-(2-amino- | 25 | 212 | 935 |
| | | | ethoxy)-ethoxy]-acetyl)₂-(γGlu)-CO-(CH₂)₁₆-CO₂H)AQ-Aib-EFIE-αMeY- | | | |
| | | | LIEGSPSSGAPPPS-(2-[2-(2-amino-ethoxy)-ethoxy]-acetyl)₄- | | | |
| | | | GEPEPEPEPEPEPK(BEA-MalDap₂-Fc)-NH₂ | | | |
| 90 | | 548 | Y-Aib-EGT-αMeF(2F)-TSD-4Pal-SI-αMeL-LEEK(2-[2-(2-amino-ethoxy)- | 7 | 193 | 935 |
| | | | ethoxy]-acetyl)₂-(γGlu)-CO-(CH₂)₁₆-CO₂H)AQ-Aib-EFIE-αMeY- | | | |
| | | | LIEGSPSSGAPPPSK(2-[2-(2-amino-ethoxy)-ethoxy]-acetyl)₆- | | | |
| | | | GPAPAPAPAPAPA-BEA-MalDap₂-Fc)-NH₂ | | | |
| 91 | | 549 | Y-Aib-EGT-αMeF(2F)-TSD-4Pal-SI-αMeL-LEEK(2-[2-(2-amino-ethoxy)- | 7 | 193 | 935 |
| | | | ethoxy]-acetyl)₂-(γGlu)-CO-(CH₂)₁₆-CO₂H)AQ-Aib-EFIE-αMeY- | | | |
| | | | LIEGSPSSGAPPPSK(2-[2-(2-amino-ethoxy)-ethoxy]-acetyl)₄- | | | |
| | | | GPEPEPEPEPEPE-BEA(MalDap₂-Fc)-NH₂ | | | |
| 92 | | 550 | Y-Aib-EGT-αMeF(2F)-TSD-4Pal-SI-αMeL-LEEK(2-[2-(2-amino-ethoxy)- | 7 | 193 | 935 |
| | | | ethoxy]-acetyl)₂-(γGlu)-CO-(CH₂)₁₆-CO2H)AQ-Aib-EFIE-αMeY- | | | |
| | | | LIEGSPSSGAPPPSK(2-[2-(2-amino-ethoxy)-ethoxy]-acetyl)₄- | | | |
| | | | GPEPEPEPEPEPEPEPE-BEA(MalDap₂-Fc)-NH₂ | | | |
| 93 | | 551 | Y-Aib-EGT-αMeF(2F)-TSD-4Pal-SI-αMeL-LE-Orn-K(2-[2-(2-amino- | 25 | 212 | 935 |
| | | | ethoxy)-ethoxy]-acetyl)₂-(γGlu)-CO-(CH₂)₁₆-CO₂H)AQ-Aib-EFIE-αMeY- | | | |
| | | | LIEGSPSSGAPPPSK(2-[2-(2-amino-ethoxy)-ethoxy]-acetyl)₆- | | | |
| | | | GPAPAPAPAPAPA-BEA(MalDap₂-Fc)-NH₂ | | | |
| 94 | | 552 | Y-Aib-EGT-αMeF(2F)-TSD-4Pal-SI-αMeL-LE-Orn-K(2-[2-(2-amino- | 25 | 212 | 935 |
| | | | ethoxy)-ethoxy]-acetyl)₂-(γGlu)-CO-(CH₂)₁₆-CO₂H)AQ-Aib-EFIE-αMeY- | | | |
| | | | LIEGSPSSGAPPPSK(2-[2-(2-amino-ethoxy)-ethoxy]-acetyl)₄- | | | |
| | | | GPEPEPEPEPEPE-BEA(MalDap₂-Fc)-NH₂ | | | |
| 95 | | 553 | Y-Aib-EGT-αMeF(2F)-TSD-4Pal-SI-αMeL-LE-Orn-K(2-[2-(2-amino- | 25 | 212 | 935 |
| | | | ethoxy)-ethoxy]-acetyl)₂-(γGlu)-CO-(CH₂)₁₆-CO₂H)AQ-Aib-EFIE-αMeY- | | | |
| | | | LIEGSPSSGAPPPSK(2-[2-(2-amino-ethoxy)-ethoxy]-acetyl)₄- | | | |
| | | | GPEPEPEPEPEPEPEPE-BEA(MalDap₂-Fc)-NH₂ | | | |
| 96 | | 554 | Y-Aib-EGT-αMeF(2F)-TSD-4Pal-SI-αMeL-LD-Orn-K(AEEA2-γGlu- | 21 | 208 | 935 |
| | | | C18_OH)AQ-Aib-EFIE-αMeY- | | | |
| | | | LIEGGGGGGGSGGGGSGAPAPAPAPAPAPK(BEA-MalDap2-Fc)-NH2 | | | |
| 97 | | 555 | Y-Aib-EGT-αMeF(2F)-TSD-4Pal-Aib-I-αMeL-LD-Orn-K(2-[2-(2-amino- | 22 | 209 | 935 |
| | | | ethoxy)-ethoxy]-acetyl)₂-(γGlu)-CO-(CH₂)₁₆-CO₂H)AQ-Aib-EFIE-αMeY- | | | |
| | | | LIEGGGGGGGSGGGGSGAPAPAPAPAPAPK(BEA-MalDap₂-Fc)-NH₂ | | | |
| 98 | | 556 | Y-Aib-EGT-αMeF(2F)-TSD-4Pal-SI-αMeL-LE-Orn-K(2-[2-(2-amino- | 23 | 210 | 935 |
| | | | ethoxy)-ethoxy]-acetyl)₂-(γGlu)-CO-(CH₂)₁₆-CO₂H)AQ-Aib-EFIE-αMeY- | | | |
| | | | LIEGGGGGGGSGGGGSGAPAPAPAPAPAPK(BEA-MalDap₂-Fc)-NH₂ | | | |
| 99 | | 557 | Y-Aib-EGT-αMeF(2F)-TSD-4Pal-Aib-I-αMeL-LE-Orn-K(2-[2-(2-amino- | 26 | 213 | 935 |
| | | | ethoxy)-ethoxy]-acetyl)₂-(γGlu)-CO-(CH₂)₁₆-CO₂H)AQ-Aib-EFIE-αMeY- | | | |
| | | | LIEGGGGGGGSGGGGSGAPAPAPAPAPAPK(BEA-MalDap₂-Fc)-NH₂ | | | |
| 100 | | 558 | Y-Aib-EGT-αMeF(2F)-TSD-4Pal-Aib-I-αMeL-LD-Orn-K(2-12-(2-amino- | 27 | 214 | 935 |
| | | | ethoxy)-ethoxy]-acetyl)₂-(γGlu)-CO-(CH₂)₁₆-CO₂H)AQ-Aib-EFIe-αMeY- | | | |
| | | | LIEGGGGGGGSGGGGSGAPAPAPAPAPAPK(BEA-MalDap₂-Fc)-NH₂ | | | |
| 101 | | 559 | Y-Aib-EGT-αMeF(2F)-TSD-4Pal-SI-αMeL-LD-Orn-K(2-[2-(2-amino- | 28 | 215 | 935 |
| | | | ethoxy)-ethoxy]-acetyl)₂-(γGlu)-CO-(CH₂)₁₆-CO₂H)AQ-Aib- | | | |
| | | | EFIK(GGGGSGGGGSGAPAPAPAPAPAPG-BEA-MalDap₂-Fc)-αMeY- | | | |
| | | | LIEGSPSSGAPPPSGS-NH₂ | | | |
| 102 | | 560 | Y-Aib-EGT-αMeF(2F)-TSD-4Pal-Aib-I-αMeL-LD-Orn-K(2-[2-(2-amino- | 29 | 216 | 935 |
| | | | ethoxy)-ethoxy]-acetyl)₂-(γGlu)-CO-(CH₂)₁₆-CO₂H)AQ-Aib- | | | |
| | | | EFIK(GGGGSGGGGSGAPAPAPAPAPAPG-BEA-MalDap₂-Fc)-αMeY- | | | |
| | | | LIEGSPSSGAPPPSGS-NH₂ | | | |
| 103 | | 56 | Y-Aib-EGT-αMeF(2F)-TSD-4Pal-Aib-I-αMeL-LD-Orn-K(ϵKϵK-(γGlu)-CO- | 30 | 217 | 935 |
| | | | (CH₂)₁₆-CO₂H)AQ-Aib-EFIE-αMeY-LIEGGPSSGAPPPSGK(PEG₂₄-BEA- | | | |
| | | | MalDap₂-Fc)-NH₂ | | | |
| 104 | | 562 | Y-Aib-EGT-αMeF(2F)-TSD-4Pal-Aib-I-αMeL-LD-Orn-K(ϵKϵK-(γGlu)-CO- | 31 | 218 | 935 |
| | | | (CH₂)₁₆-CO₂H)AQ-Aib-EFIE-αMeY-LIEGGESSGAPPPSGK(PEG₂₄-BEA- | | | |
| | | | MalDap₂-Fc)-NH₂ | | | |
| 105 | | 563 | Y-Aib-EGT-αMeF(2F)-TSD-4Pal-Aib-I-αMeL-LD-Orn-K(ϵKϵK-(γGlu)-CO- | 32 | 219 | 935 |
| | | | (CH₂)₁₆-CO₂H)AQ-Aib-EFIE-αMeY-LIEGG-Orn-SSGAPPPSGK(PEG₂₄- | | | |
| | | | BEA-MalDap₂-Fc)-NH₂ | | | |
| 106 | | 564 | Y-Aib-EGT-αMeF(2F)-TSD-4Pal-Aib-I-αMeL-LD-Orn-K(ϵKϵK-(γGlu)-CO- | 33 | 220 | 935 |
| | | | (CH₂)₁₆-CO₂H)AQ-Aib-EFIE-αMeY-LIEGGPPSGAPPPSGK(PEG₂₄-BEA- | | | |
| | | | MalDap₂-Fc)-NH₂ | | | |
| 107 | | 565 | Y-Aib-EGT-αMeF(2F)-TSD-4Pal-Aib-I-αMeL-LD-Orn-K(ϵKϵK-(γGlu)-CO- | 34 | 221 | 935 |
| | | | (CH₂)₁₆-CO₂H)AQ-Aib-EFIE-αMeY-LIEGGPPS-Aib-Orn-PPP-Orn- | | | |
| | | | GK(PEG₂₄-BEA-MalDap₂-Fc)-NH₂ | | | |
| 108 | | 566 | Y-Aib-EGT-αMeF(2F)-TSD-4Pal-Aib-I-αMeL-LD-Orn-K(-(γGlu)-CO- | 35 | 222 | 935 |
| | | | (CH₂)₁₆-CO₂H)AQ-Aib-EFIE-αMeY-LIEGSPSSGAPPPGGK(PEG₂₄-BEA- | | | |
| | | | MalDap₂-Fc)-NH₂ | | | |
| 109 | | 567 | Y-Aib-EGT-αMeF(2F)-TSD-4Pal-Aib-I-αMeL-LD-Orn-K(ϵKϵK-(γGlu)-CO- | 36 | 223 | 935 |
| | | | (CH₂)₁₆-CO₂H)AQ-Aib-EFIK(PEG₂₄-BEA-MalDap₂-Fc)-αMeY- | | | |
| | | | LIEGGPSSGAPPPSGG-NH₂ | | | |
| 110 | | 568 | Y-Aib-EGT-αMeF(2F)-TSD-4Pal-Aib-I-αMeL-LD-Orn-K(ϵKϵK-(γGlu)-CO- | 37 | 224 | 935 |
| | | | (CH₂)₁₆-CO₂H)AQ-Aib-EFIK(PEG₂₄-BEA-MalDap₂-Fc)-αMeY- | | | |
| | | | LIEGGESSGAPPPSGG-NH₂ | | | |
| 111 | | 569 | Y-Aib-EGT-αMeF(2F)-TSD-4Pal-Aib-I-αMeL-LD-Orn-K(ϵKϵK-(γGlu)-CO- | 38 | 225 | 935 |
| | | | (CH₂)₁₆-CO₂H)AQ-Aib-EFIK(PEG₂₄-BEA-MalDap₂-Fc)-αMeY-LIEGG-Orn- | | | |
| | | | SSGAPPPSGG-NH₂ | | | |
| 112 | | 570 | Y-Aib-EGT-αMeF(2F)-TSD-4Pal-Aib-I-αMeL-LD-Orn-K(ϵKϵK-(γGlu)-CO- | 39 | 226 | 935 |
| | | | (CH₂)₁₆-CO₂H)AQ-Aib-EFIK(PEG₂₄-BEA-MalDap₂-Fc)-αMeY- | | | |
| | | | LIEGGPPSGAPPPSGG-NH₂ | | | |
| 113 | | 571 | Y-Aib-EGT-αMeF(2F)-TSD-4Pal-Aib-I-αMeL-LD-Orn-K(ϵKϵK-(γGlu)-CO- | 40 | 227 | 935 |
| | | | (CH₂)₁₆-CO₂H)AQ-Aib-EFIK(PEG₂₄-BEA-MalDap₂-Fc)-αMeY-LIEGGPPS- | | | |
| | | | Aib-Orn-PPP-Orn-GG-NH₂ | | | |
| 114 | | 572 | Y-Aib-EGT-αMeF(2F)-TSD-4Pal-Aib-I-αMeL-LD-Orn-K(ϵKϵK-(γGlu)-CO- | 41 | 228 | 935 |
| | | | (CH₂)₁₆-CO₂H)AQ-Aib-EFIK(PEG₂₄-BEA-MalDap₂-Fc)-αMeY- | | | |
| | | | LIEGSPSSGAPPPGGG-NH₂ | | | |
| 115 | | 573 | Y-Aib-EGT-αMeF(2F)-TSD-4Pal-Aib-I-αMeL-LD-Orn-K(ϵKϵK-(γGlu)-CO- | 22 | 229 | 935 |
| | | | (CH₂)₁₆-CO₂H)AQ-Aib-EFIE-αMeY- | | | |
| | | | LIEGGGGGGGSGGGGSGGGGSK(BEA-MalDap₂-Fc)-NH₂ | | | |
| 116 | | 574 | Y-Aib-EGT-αMeF(2F)-TSD-4Pal-Aib-I-αMeL-LD-Orn-K(ϵKϵK-(γGlu)-CO- | 42 | 230 | 935 |
| | | | (CH₂)₁₆-CO₂H)AQ-Aib-EFIE-αMeY-LIEGGPSSGK(BEA-MalDap₂-Fc)-NH₂ | | | |
| 117 | | 575 | Y-Aib-EGT-αMeF(2F)-TSD-4Pal-Aib-I-αMeL-LD-Orn-K(ϵKϵK-(γGlu)-CO- | 22 | 229 | 935 |
| | | | (CH₂)₁₆-CO₂H)AQ-Aib-EFIE-αMeY-LIEGGG-PEG₂₄-K(BEA-MalDap₂-Fc)- | | | |
| | | | NH₂ | | | |
| 118 | | 576 | Y-Aib-EGT-αMeF(2F)-TSD-4Pal-Aib-I-αMeL-LD-Orn-K(ϵKϵK-(γGlu)-CO- | 22 | 229 | 935 |
| | | | (CH₂)₁₆-CO₂H)AQ-Aib-EFIE-αMeY-LIEGGGK(PEG₂₄-BEA-MalDap₂-Fc)- | | | |
| | | | NH₂ | | | |
| 119 | | 577 | Y-Aib-EGT-αMeF(2F)-TSD-4Pal-Aib-I-αMeL-LD-Orn-K(ϵKϵK-(γGlu)-CO- | 43 | 231 | 935 |
| | | | (CH₂)₁₆-CO₂H)AQ-Aib-EFIK(PEG₂₄-BEA-MalDap₂-Fc)-αMeY-LIEGGG- | | | |
| | | | NH₂ | | | |
| 120 | | 578 | Y-Aib-EGT-αMeF(2F)-TSD-4Pal-Aib-I-αMeL-LD-Orn-K(ϵKϵK-(γGlu)-CO- | 44 | 232 | 935 |
| | | | (CH₂)₁₆-CO₂H)AQ-Aib-EFIK(PEG₂₄-BEA-MalDap₂-Fc)-αMeY- | | | |
| | | | LIEGGPSSG-NH₂ | | | |
| 121 | | 579 | Y-Aib-EGT-αMeF(2F)-TSD-4Pal-Aib-I-αMeL-LD-Orn-K(ϵKϵK-(γGlu)-CO- | 45 | 233 | 935 |
| | | | (CH₂)₁₆-CO₂H)AQ-Aib-EFIE-αMeY-LIK(PEG₂₄-BEA-MalDap₂-Fc)GGG- | | | |
| | | | NH₂ | | | |
| 122 | | 580 | Y-Aib-EGT-αMeF(2F)-TSD-4Pal-Aib-I-αMeL-LD-Orn-K(ϵKϵK(γGlu)-CO- | 46 | 234 | 935 |
| | | | (CH₂)₁₆-CO₂H)AQ-Aib-EFIE-αMeY-LIK(PEG₂₄-BEA-MalDap₂- | | | |
| | | | Fc)GGPSSG-NH₂ | | | |
| 123 | | 581 | Y-Aib-EGT-αMeF(2F)-TSD-4Pal-Aib-I-αMeL-LD-Orn-K(ϵKϵK-(γGlu)-CO- | 22 | 229 | 935 |
| | | | (CH₂)₁₆-CO₂H)AQ-Aib-EFIE-αMeY- | | | |
| | | | LIEGGGGGGGSGGGGSGAPAPAPAPAPAPK(BEA-MalDap₂-Fc)-NH₂ | | | |
| 124 | | 582 | Y-Aib-EGT-αMeF(2F)-TSD-4Pal-Aib-I-αMeL-LD-Orn-K(ϵKϵK-(γGlu)-CO- | 22 | 229 | 935 |
| | | | (CH₂)₁₆-CO₂H)AQ-Aib-EFIE-αMeY- | | | |
| | | | LIEGGGGGGGQGGGGQGGGGQK(BEA-MalDap₂-Fc)-NH₂ | | | |
| 125 | | 583 | Y-Aib-EGT-αMeF(2F)-TSD-4Pal-Aib-I-αMeL-LD-Orn-K(ϵKϵK-(γGlu)-CO- | 22 | 229 | 935 |
| | | | (CH₂)₁₆-CO₂H)AQ-Aib-EFIE-αMeY-LIEGGGGGGG-4Pal-GGGG-4Pal- | | | |
| | | | GGGG-4Pal-K(BEA-MalDap₂-Fc)-NH₂ | | | |
| 126 | | 584 | Y-Aib-EGT-αMeF(2F)-TSD-4Pal-Aib-I-αMeL-LD-Orn-K(ϵKϵK-(γGlu)-CO- | 42 | 230 | 935 |
| | | | (CH₂)₁₆-CO₂H)AQ-Aib-EFIE-αMeY-LIEGGPSSGK(PEG₂₄-BEA-MalDap₂- | | | |
| | | | Fc)-NH₂ | | | |
| 127 | 5 | 585 | Y-Aib-EGT-αMeF(2F)-TSD-4Pal-Aib-I-αMeL-LD-Orn-K(2-[2-(2-amino- | 43 | 235 | 935 |
| | | | ethoxy)-ethoxy]-acetyl)₂-(γGlu)-CO-(CH₂)₁₆-CO₂H)AQ-Aib-EFIK(PEG₂₄- | | | |
| | | | BEA-MalDap₂-Fc)-αMeY-LIEGGG-NH₂ | | | |
| 128 | | 586 | Y-Aib-EGT-αMeF(2F)-TSD-4Pal-Aib-I-αMeL-LD-Orn-K(2-[2-(2-amino- | 44 | 236 | 935 |
| | | | ethoxy)-ethoxy]-acetyl)₂-(γGlu)-CO-(CH₂)₁₆-CO₂H)AQ-Aib-EFIK(PEG₂₄- | | | |
| | | | BEA-MalDap₂-Fc)-αMeY-LIEGGPSSG-NH₂ | | | |
| 129 | 6 | 587 | Y-Aib-EGT-αMeF(2F)-TSD-4Pal-Aib-I-αMeL-LD-Orn-K(2-[2-(2-amino- | 45 | 237 | 935 |
| | | | ethoxy)-ethoxy]-acetyl)₂-(γGlu)-CO-(CH₂)₁₆-CO₂H)AQ-Aib-EFIE-αMeY- | | | |
| | | | LIK(PEG₂₄-BEA-MalDap₂-Fc)GGG-NH₂ | | | |
| 130 | | 588 | Y-Aib-EGT-αMeF(2F)-TSD-4Pal-Aib-I-αMeL-LD-Orn-K(2-[2-(2-amino- | 46 | 238 | 935 |
| | | | ethoxy)-ethoxy]-acetyl)₂-(γGlu)-CO-(CH₂)₁₆-CO₂H)AQ-Aib-EFIE-αMeY- | | | |
| | | | LIK(PEG₂₄-BEA-MalDap₂-Fc)GGPSSG-NH₂ | | | |
| 131 | | 589 | Y-Aib-EGT-αMeF(2F)-TSD-4Pal-Aib-I-αMeL-LD-Orn-K(2-[2-(2-amino- | 42 | 239 | 935 |
| | | | ethoxy)-ethoxy]-acetyl)₂-(γGlu)-CO-(CH₂)₁₆-CO₂H)AQ-Aib-EFIE-αMeY- | | | |
| | | | LIEGGPSSGK(PEG₂₄-BEA-MalDap₂-Fc)-NH₂ | | | |
| 132 | | 590 | Y-Aib-EGT-αMeF(2F)-TSD-4Pal-Aib-I-αMeL-LD-Orn-K(2-[2-(2-amino- | 22 | 209 | 935 |
| | | | ethoxy)-ethoxy]-acetyl)₂-(γGlu)-CO-(CH₂)₁₆-CO₂H)AQ-Aib-EFIE-αMeY- | | | |
| | | | LIEGGG-PEG₂₄-K(BEA-MalDap₂-Fc)-NH₂ | | | |
| 133 | | 591 | Y-Aib-EGT-αMeF(2F)-TSD-4Pal-Aib-I-αMeL-LD-Orn-K(2-[2-(2-amino- | 47 | 240 | 935 |
| | | | ethoxy)-ethoxy]-acetyl)₂-(γGlu)-CO-(CH₂)₁₆-CO₂H)AQ-Aib-EFIE-αMeY- | | | |
| | | | LIEGSPSSGAPPPSK(PEG₂₄-BEA-MalDap₂-Fc)-NH₂ | | | |
| 134 | | 592 | Y-Aib-EGT-αMeF(2F)-TSD-4Pal-Aib-I-αMeL-LD-Orn-K(ϵKϵK-(γGlu)-CO- | 47 | 241 | 935 |
| | | | (CH₂)₁₆-CO₂H)AQ-Aib-EFIE-αMeY-LIEGSPSSGAPPPSK(PEG₂₄-BEA- | | | |
| | | | MalDap₂-Fc)-NH₂ | | | |
| 135 | | 593 | Y-Aib-EGT-αMeF(2F)-TSD-4Pal-Aib-I-αMeL-LDEK(ϵKϵK-(γGlu)-CO- | 5 | 242 | 935 |
| | | | (CH₂)₁₆-CO₂H)AQ-Aib-EFIE-αMeY-LIEGSPSSGAPPPSK(PEG₂₄-BEA- | | | |
| | | | MalDap₂-Fc)-NH₂ | | | |
| 136 | 7 | 594 | Y-Aib-EGT-αMeF(2F)-TSD-4Pal-Aib-I-αMeL-LD-Orn-K(2-[2-(2-amino- | 48 | 243 | 935 |
| | | | ethoxy)-ethoxy]-acetyl)₂-(γGlu)-CO-(CH₂)₁₆-CO₂H)AQ-Aib-EFIE-αMeY- | | | |
| | | | LIEGGPSSGAPPPSK(PEG₂₄-BEA-MalDap₂-Fc)-NH₂ | | | |
| 137 | | 595 | Y-Aib-EGT-αMeF(2F)-TSD-4Pal-Aib-I-αMeL-LD-Orn-K(ϵKϵK-(γGlu)-CO- | 48 | 244 | 935 |
| | | | (CH₂)₁₆-CO₂H)AQ-Aib-EFIE-αMeY-LIEGGPSSGAPPPSK(PEG₂₄-BEA- | | | |
| | | | MalDap₂-Fc)-NH₂ | | | |
| 138 | | 596 | Y-Aib-EGT-αMeF(2F)-TSD-4Pal-Aib-I-αMeL-LDEK(ϵKϵK-(γGlu)-CO- | 49 | 245 | 935 |
| | | | (CH₂)₁₆-CO₂H)AQ-Aib-EFIE-αMeY-LIEGGPSSGAPPPSK(PEG₂₄-BEA- | | | |
| | | | MalDap₂-Fc)-NH₂ | | | |
| 139 | | 597 | Y-Aib-EGT-αMeF(2F)-TSD-4Pal-Aib-I-αMeL-LD-Orn-K(ϵKϵK-(γGlu)-CO- | 50 | 246 | 935 |
| | | | (CH₂)₁₆-C_{O2}H)AQ-Aib-EFIe-αMeY-LIEGSPSSGAPPPSK(PEG₂₄-BEA- | | | |
| | | | MalDap₂ Fc)-NH₂ | | | |
| 140 | | 598 | Y-Aib-EGT-αMeF(2F)-TSD-4Pal-Aib-I-αMeL-LD-Orn-K(ϵKϵK-(γGlu)-CO- | 27 | 247 | 935 |
| | | | (CH₂)₁₆-CO₂H)AQ-Aib-EFIe-αMeY-LIEGGGK(PEG₂₄-BEA-MalDap₂ Fc)- | | | |
| | | | NH₂ | | | |
| 141 | | 599 | Y-Aib-EGT-αMeF(2F)-TSD-4Pal-Aib-I-αMeL-LD-Orn-K(ϵKϵK-(γGlu)-CO- | 51 | 248 | 935 |
| | | | (CH₂)₁₆-CO₂H)AQ-Aib-EFIE-αMeY-LIEGG-Orn-SSGAPPPSK(PEG₂₄-BEA- | | | |
| | | | MalDap₂ Fc)-NH₂ | | | |
| 142 | | 600 | Y-Aib-EGT-aMcF(2F)-TSD-4Pal-Aib-I-αMeL-LD-Orn-K(2-[2-(2-amino- | 51 | 249 | 935 |
| | | | ethoxy)-ethoxy]-acetyl)₂-(γGlu)-CO-(CH₂)₁₆-CO₂H)AQ-Aib-EFIE-αMeY- | | | |
| | | | LIEGG-Orn-SSGAPPPSK(PEG₂₄-BEA-MalDap₂ Fc)-NH2 | | | |
| 143 | | 601 | Y-Aib-EGT-αMeF(2F)-TSD-4Pal-Aib-I-αMeL-LD-Orn-K(ϵKϵK-(γGlu)-CO- | 52 | 250 | 935 |
| | | | (CH₂)₁₆-CO₂H)AQ-Aib-EFIE-αMeY-LIEGG-Orn-K(PEG₂₄-BEA-MalDap₂ | | | |
| | | | Fc)-NH₂ | | | |
| 144 | | 602 | Y-Aib-EGT-αMeF(2F)-TSD-4Pal-Aib-I-αMeL-LD-Orn-K(2-12-(2-amino- | 52 | 251 | 935 |
| | | | ethoxy)-ethoxy]-acetyl)₂-(γGlu)-CO-(CH₂)₁₆-CO₂H)AQ-Aib-EFIE-αMeY- | | | |
| | | | LIEGG-Orn-K(PEG₂₄-BEA-MalDap₂ Fc)-NH₂ | | | |
| 145 | | 603 | Y-Aib-EGT-αMeF(2F)-TSD-4Pal-Aib-I-αMeL-LD-Orn-K(ϵKϵK-(γGlu)-CO- | 53 | 252 | 935 |
| | | | (CH₂)₁₆-CO₂H)AQ-Aib-Orn-FIE-αMeY-LIEGSPSSGAPPPSK(PEG₂₄-BEA- | | | |
| | | | MalDap₂ Fc)-NH₂ | | | |
| 146 | | 604 | Y-Aib-EGT-αMeF(2F)-TSD-4Pal-Aib-I-αMeL-LD-Orn-K(2-[2-(2-amino- | 53 | 253 | 935 |
| | | | ethoxy)-ethoxy]-acetyl)₂-(γGlu)-CO-(CH₂)₁₆-CO₂H)AQ-Aib-Orn-FIE-αMeY- | | | |
| | | | LIEGSPSSGAPPPSK(PEG₂₄-BEA-MalDap₂ Fc)-NH₂ | | | |
| 147 | | 605 | Y-Aib-EGT-αMeF(2F)-TSD-4Pal-Aib-I-αMeL-LD-Orn-K(2-[2-(2-amino- | 54 | 254 | 935 |
| | | | ethoxy)-ethoxy]-acetyl)₂-(γGlu)-CO-(CH₂)₁₆-CO₂H)AQ-Aib-EFIQ-αMeY- | | | |
| | | | LIEGSPSSGAPPPSK(PEG₂₄-BEA-MalDap₂ Fc)-NH₂ | | | |
| 148 | | 606 | Y-Aib-EGT-αMeF(2F)-TSD-4Pal-Aib-I-αMeL-LD-Orn-K(ϵKϵK-(γGlu)-CO- | 54 | 255 | 935 |
| | | | (CH₂)₁₆-CO₂H)AQ-Aib-EFIQ-αMeY-LIEGSPSSGAPPPSK(PEG₂₄-BEA- | | | |
| | | | MalDap₂ Fc)-NH₂ | | | |
| 149 | | 607 | Y-Aib-EGT-αMeF(2F)-TSD-4Pal-Aib-I-αMeL-LD-Orn-K(ϵKϵK-(γGlu)-CO- | 47 | 241 | 935 |
| | | | (CH₂)₁₆-CO₂H)AQ-Aib-EFIE-αMeY-LIEGSPSSGAPPPSK(2-[2-(2-amino- | | | |
| | | | ethoxy)-ethoxy]-acetyl)₆-GPAPAPAPAPAPA-BEA-MalDap₂-Fc)-NH₂ | | | |
| 150 | | 608 | Y-Aib-EGT-αMeF(2F)-TSD-4Pal-Aib-I-αMeL-LD-Orn-K(&K&K-(γGlu)-CO- | 50 | 246 | 935 |
| | | | (CH₂)₁₆-CO₂H)AQ-Aib-EFIe-αMeY-LIEGSPSSGAPPPSK(2-[2-(2-amino- | | | |
| | | | ethoxy)-ethoxy]-acetyl),-GPAPAPAPAPAPA-BEA-MalDap₂-Fc)-NH₂ | | | |
| 151 | | 609 | Y-Aib-EGT-αMeF(2F)-TSD-4Pal-Aib-I-αMeL-LD-Orn-K(2-[2-(2-amino- | 47 | 240 | 935 |
| | | | ethoxy)-ethoxy]-acetyl)₂-(γGlu)-CO-(CH₂)₁₆-CO₂H)AQ-Aib-EFIE-αMeY- | | | |
| | | | LIEGSPSSGAPPPSK(2-[2-(2-amino-ethoxy)-ethoxy]-acetyl)₄- | | | |
| | | | GPAPAPAPAPAPA-BEA-MalDap₂-Fc)-NH₂ | | | |
| 152 | | 610 | Y-Aib-EGT-αMeF(2F)-TSD-4Pal-Aib-I-αMeL-LD-Orn-K(2-[2-(2-amino- | 47 | 240 | 935 |
| | | | ethoxy)-ethoxy]-acetyl)₂-(γGlu)-CO-(CH₂)₁₆-CO₂H)AQ-Aib-EFIE-αMeY- | | | |
| | | | LIEGSPSSGAPPPSK(2-[2-(2-amino-ethoxy)-ethoxy]-acetyl)₄-GPAPAPAPA- | | | |
| | | | BEA-MalDap₂-Fc)-NH₂ | | | |
| 153 | | 611 | Y-Aib-EGT-αMeF(2F)-TSD-4Pal-Aib-I-αMeL-LD-Orn-K(2-[2-(2-amino- | 47 | 240 | 935 |
| | | | ethoxy)-ethoxy]-acetyl)₂-(γGlu)-CO-(CH₂)₁₆-CO₂H)AQ-Aib-EFIE-αMeY- | | | |
| | | | LIEGSPSSGAPPPSK(2-[2-(2-amino-ethoxy)-ethoxy]-acetyl)₄-GPAPA-BEA- | | | |
| | | | MalDap₂-Fc)-NH₂ | | | |
| 154 | | 612 | Y-Aib-EGT-αMeF(2F)-TSD-4Pal-Aib-I-αMeL-LD-Orn-K(2-[2-(2-amino- | 47 | 240 | 935 |
| | | | ethoxy)-ethoxy]-acetyl)₂-(γGlu)-CO-(CH₂)₁₆-CO₂H)AQ-Aib-EFIE-αMeY- | | | |
| | | | LIEGSPSSGAPPPSK(2-[2-(2-amino-ethoxy)-ethoxy]-acetyl)₆- | | | |
| | | | GPAPAPAPAPAPA-BEA-MalDap₂-Fc)-NH₂ | | | |
| 155 | | 613 | Y-Aib-EGT-αMeF(2F)-TSD-4Pal-Aib-I-αMeL-LD-Orn-K(2-[2-(2-amino- | 47 | 240 | 935 |
| | | | ethoxy)-ethoxy]-acetyl)₂-(γGlu)-CO-(CH₂)₁₆-CO₂H)AQ-Aib-EFIE-αMeY- | | | |
| | | | LIEGSPSSGAPPPSK(2-[2-(2-amino-ethoxy)-ethoxy]-acetyl)₆-GPAPAPAPA- | | | |
| | | | BEA-MalDap₂-Fc)-NH₂ | | | |
| 156 | | 614 | Y-Aib-EGT-αMeF(2F)-TSD-4Pal-Aib-I-αMeL-LD-Orn-K(2-12-(2-amino- | 47 | 240 | 935 |
| | | | ethoxy)-ethoxy]-acetyl)₂-(γGlu)-CO-(CH₂)₁₆-CO₂H)AQ-Aib-EFIE-αMeY- | | | |
| | | | LIEGSPSSGAPPPSK(2-[2-(2-amino-ethoxy)-ethoxy]-acetyl)₆-GPAPA-BEA- | | | |
| | | | MalDap₂-Fc)-NH₂ | | | |
| 157 | | 615 | Y-Aib-EGT-αMeF(2F)-TSD-4Pal-SI-αMeL-LD-Orn-K(2-[2-(2-amino- | 55 | 256 | 935 |
| | | | ethoxy)-ethoxy]-acetyl)₂-(γGlu)-CO-(CH₂)₁₆-CO₂H)AQ-Aib-EFIE-αMeY- | | | |
| | | | LIEGSPSSGAPPPSK(2-[2-(2-amino-ethoxy)-ethoxy]-acetyl)₆- | | | |
| | | | GPAPAPAPAPAPA-BEA-MalDap₂-Fc)-NH₂ | | | |
| 158 | 8 | 616 | Y-Aib-EGT-αMeF(2F)-TSD-4Pal-SI-αMeL-LD-Orn-K(ϵKϵK-(γGlu)-CO- | 55 | 257 | 935 |
| | | | (CH₂)₁₆-CO₂H)AQ-Aib-EFIE-αMeY-LIEGSPSSGAPPPSK(2-[2-(2-amino- | | | |
| | | | ethoxy)-ethoxy]-acetyl)₆-GPAPAPAPAPAPA-BEA-MalDap₂-Fc)-NH₂ | | | |
| 159 | | 617 | Y-Aib-EGT-αMeF(2F)-TSD-4Pal-SI-αMeL-LD-Orn-K(ϵKϵK-(γGlu)-CO- | 2 | 258 | 935 |
| | | | (CH2)16-CO2H)AQ-Aib-EFIe-αMeY-LIEGSPSSGAPPPSK(2-[2-(2-amino- | | | |
| | | | ethoxy)-ethoxy]-acetyl)₆-GPAPAPAPAPAPA-BEA-MalDap₂-Fc)-NH₂ | | | |
| 160 | | 618 | Y-Aib-EGT-αMeF(2F)-TSD-4Pal-Aib-I-αMeL-LD-Orn-K(2-[2-(2-amino- | 47 | 240 | 935 |
| | | | ethoxy)-ethoxy]-acetyl)₂-(γGlu)-CO-(CH₂)₁₆-CO₂H)AQ-Aib-EFIE-αMeY- | | | |
| | | | LIEGSPSSGAPPPSK(2-[2-(2-amino-ethoxy)-ethoxy]-acetyl)₄-BEA- | | | |
| | | | MalDap₂-Fc)-NH₂ | | | |
| 161 | | 619 | Y-Aib-EGT-αMeF(2F)-TSD-4Pal-Aib-I-αMeL-LD-Orn-K(2-12-(2-amino- | 47 | 240 | 935 |
| | | | ethoxy)-ethoxy]-acetyl)₂-(γGlu)-CO-(CH₂)₁₆-CO₂H)AQ-Aib-EFIE-αMeY- | | | |
| | | | LIEGSPSSGAPPPSK(2-[2-(2-amino-ethoxy)-ethoxy]-acetyl)₆-BEA- | | | |
| | | | MalDap₂-Fc)-NH₂ | | | |
| 162 | | 620 | Y-Aib-EGT-αMeF(2F)-TSD-4Pal-Aib-I-αMeL-LD-Orn-K(2-[2-(2-amino- | 47 | 240 | 935 |
| | | | ethoxy)-ethoxy]-acetyl)₂-(γGlu)-CO-(CH₂)₁₆-CO₂H)AQ-Aib-EFIE-αMeY- | | | |
| | | | LIEGSPSSGAPPPSK(2-[2-(2-amino-ethoxy)-ethoxy]-acetyl)₄-BEA- | | | |
| | | | MalDap₂-Fc)-NH₂ | | | |
| 163 | | 621 | Y-Aib-EGT-αMeF(2F)-TSD-4Pal-Aib-I-αMeL-LD-Orn-K(2-[2-(2-amino- | 56 | 259 | 935 |
| | | | ethoxy)-ethoxy]-acetyl)₂-(γGlu)-CO-(CH₂)₁₆-CO₂H)AQ-Aib-EFIE-αMeY- | | | |
| | | | LIE-Aib-SPSSGAPPPSK(PEG₂₄-BEA-MalDap₂-Fc)-NH₂ | | | |
| 164 | | 622 | Y-Aib-EGT-αMeF(2F)-TSD-4Pal-Aib-I-αMeL-LD-Orn-K(ϵKϵK-(γGlu)-CO- | 56 | 260 | 935 |
| | | | (CH₂)₁₆-CO₂H)AQ-Aib-EFIE-αMeY-LIE-Aib-SPSSGAPPPSK(PEG₂₄-BEA- | | | |
| | | | MalDap₂-Fc)-NH₂ | | | |
| 165 | | 623 | Y-Aib-EGT-αMeF(2F)-TSD-4Pal-Aib-I-αMeL-LD-Orn-K(ϵKϵK-(γGlu)-CO- | 57 | 261 | 935 |
| | | | (CH₂)₁₆-CO₂H)AQ-Aib-EFIe-αMeY-LIE-Aib-SPSSGAPPPSK(PEG₂₄-BEA- | | | |
| | | | MalDap₂-Fc)-NH₂ | | | |
| 166 | | 624 | Y-Aib-EGT-αMeF(2F)-TSD-4Pal-SI-αMeL-LD-Orn-K(2-[2-(2-amino- | 55 | 256 | 935 |
| | | | ethoxy)-ethoxy]-acetyl)₂-(γGlu)-CO-(CH₂)₁₆-CO₂H)AQ-Aib-EFIE-αMeY- | | | |
| | | | LIEGSPSSGAPPPSK(PEG₂₄-BEA-MalDap₂-Fc)-NH₂ | | | |
| 167 | | 625 | Y-Aib-EGT-αMeF(2F)-TSD-4Pal-SI-αMeL-LD-Orn-K(2-[2-(2-amino- | 58 | 262 | 935 |
| | | | ethoxy)-ethoxy]-acetyl)₂-(γGlu)-CO-(CH₂)₁₆-CO₂H)AQ-Aib-EFIQ-αMeY- | | | |
| | | | LIEGSPSSGAPPPSK(PEG₂₄-BEA-MalDap₂-Fc)-NH₂ | | | |
| 168 | 9 | 626 | Y-Aib-EGT-αMeF(2F)-TSD-4Pal-SI-αMeL-LD-Orn-K(ϵKϵK-(γGlu)-CO- | 55 | 257 | 935 |
| | | | (CH₂)₁₆-CO₂H)AQ-Aib-EFIE-αMeY-LIEGSPSSGAPPPSK(PEG₂₄-BEA- | | | |
| | | | MalDap₂-Fc)-NH₂ | | | |
| 169 | 10 | 627 | Y-Aib-EGT-aMcF(2F)-TSD-4Pal-SI-αMeL-LD-Orn-K(ϵKϵK-(γGlu)-CO- | 58 | 263 | 935 |
| | | | (CH₂)₁₆-CO₂H)AQ-Aib-EFIQ-αMeY-LIEGSPSSGAPPPSK(PEG₂₄-BEA- | | | |
| | | | MalDap₂-Fc)-NH₂ | | | |
| 170 | 11 | 628 | Y-Aib-EGT-aMcF(2F)-TSDY-Aib-I-αMeL-LD-Orn-K(2-[2-(2-amino- | 59 | 264 | 935 |
| | | | ethoxy)-ethoxy]-acetyl)₂-(γGlu)-CO-(CH₂)₁₆-CO₂H)AQ-Aib-EFIE-αMeY- | | | |
| | | | LIEGSPSSGAPPPSK(PEG₂₄-BEA-MalDap₂-Fc)-NH₂ | | | |
| 171 | | 629 | Y-Aib-EGT-αMeF(2F)-TSDY-Aib-I-αMeL-LD-Orn-K(2-[2-(2-amino- | 60 | 265 | 935 |
| | | | ethoxy)-ethoxy]-acetyl)₂-(γGlu)-CO-(CH₂)₁₆-CO₂H)AQ-Aib-EFIQ-αMeY- | | | |
| | | | LIEGSPSSGAPPPSK(PEG₂₄-BEA-MalDap₂-Fc)-NH₂ | | | |
| 172 | 12 | 630 | Y-Aib-EGT-αMeF(2F)-TSDY-Aib-I-αMeL-LD-Orn-K(ϵKϵK-(γGlu)-CO- | 61 | 266 | 935 |
| | | | (CH₂)₁₆-CO₂H)AQ-Aib-EFIe-αMeY-LIEGSPSSGAPPPSK(PEG₂₄-BEA- | | | |
| | | | MalDap₂-Fc)-NH₂ | | | |
| 173 | 13 | 631 | Y-Aib-EGT-αMeF(2F)-TSDY-Aib-I-αMeL-LD-Orn-K(ϵKϵK-(γGlu)-CO- | 59 | 267 | 935 |
| | | | (CH₂)₁₆-CO₂H)AQ-Aib-EFIE-αMeY-LIEGSPSSGAPPPSK(PEG₂₄-BEA- | | | |
| | | | MalDap₂-Fc)-NH₂ | | | |
| 174 | | 632 | Y-Aib-EGT-αMeF(2F)-TSDY-Aib-I-αMeL-LD-Orn-K(ϵKϵK-(γGlu)-CO- | 60 | 268 | 935 |
| | | | (CH₂)₁₆-CO₂H)AQ-Aib-EFIQ-αMeY-LIEGSPSSGAPPPSK(PEG₂₄-BEA- | | | |
| | | | MalDap₂-Fc)-NH₂ | | | |
| 175 | | 633 | Y-Aib-EGT-αMeF(2F)-TSD-4Pal-Aib-I-αMeL-LD-Orn-K(ϵKϵK-(γGlu)-CO- | 62 | 269 | 935 |
| | | | (CH₂)₁₆-CO₂H)AQ-αMeL-EFIE-αMeY-LIEGSPSSGAPPPSK(PEG₂₄-BEA- | | | |
| | | | MalDap₂-Fc)-NH₂ | | | |
| 176 | | 634 | Y-Aib-EGT-αMeF(2F)-TSD-4Pal-Aib-I-αMeL-LD-Orn-K(ϵKϵK-(γGlu)-CO- | 63 | 270 | 935 |
| | | | (CH₂)₁₆-CO₂H)AQ-Iva-EFIE-αMeY-LIEGSPSSGAPPPSK(PEG₂₄-BEA- | | | |
| | | | MalDap₂-Fc)-NH₂ | | | |
| 177 | | 635 | Y-Aib-EGT-αMeF(2F)-TSD-4Pal-Aib-I-αMeL-LD-Orn-K(2-[2-(2-amino- | 64 | 271 | 935 |
| | | | ethoxy)-ethoxy]-acetyl)₂-(γGlu)-CO-(CH₂)₁₆-CO₂H)AQ-αMeL-EFIQ-αMeY- | | | |
| | | | LIEGSPSSGAPPPSK(PEG₂₄-BEA-MalDap₂-Fc)-NH₂ | | | |
| 178 | | 636 | Y-Aib-EGT-αMeF(2F)-TSD-4Pal-Aib-I-αMeL-LD-Orn-K(2-[2-(2-amino- | 65 | 272 | 935 |
| | | | ethoxy)-ethoxy]-acetyl)₂-(γGlu)-CO-(CH₂)₁₆-CO₂H)AQ-Iva-EFIQ-αMeY- | | | |
| | | | LIEGSPSSGAPPPSK(PEG₂₄-BEA-MalDap₂-Fc)-NH₂ | | | |
| 179 | | 637 | Y-Aib-EGT-αMeF(2F)-TSD-4Pal-Aib-I-αMeL-LD-Orn-K(ϵKϵK-(γGlu)-CO- | 64 | 273 | 935 |
| | | | (CH₂)₁₆-CO₂H)AQ-_{α}MeL-EFIQ-αMeY-LIEGSPSSGAPPPSK(PEG₂₄-BEA- | | | |
| | | | MalDap₂-Fc)-NH₂ | | | |
| 180 | | 638 | Y-Aib-EGT-αMeF(2F)-TSD-4Pal-Aib-I-αMeL-LD-Orn-K(ϵKϵK-(γGlu)-CO- | 65 | 274 | 935 |
| | | | (CH₂)₁₆-CO₂H)AQ-Iva-EFIQ-αMeY-LIEGSPSSGAPPPSK(PEG₂₄-BEA- | | | |
| | | | MalDap₂-Fc)-NH₂ | | | |
| 181 | 14 | 639 | Y-Aib-EGT-αMeF(2F)-TSD-4Pal-Aib-I-αMeL-LD-Orn-K(2-[2-(2-amino- | 66 | 275 | 935 |
| | | | ethoxy)-ethoxy]-acetyl)₂-(γGlu)-CO-(CH₂)₁₆-CO₂H)AQ-Aib-QFIE-αMeY- | | | |
| | | | LIEGSPSSGAPPPSK(PEG₂₄-BEA-MalDap₂-Fc)-NH₂ | | | |
| 182 | | 640 | Y-Aib-EGT-αMeF(2F)-TSD-4Pal-Aib-I-αMeL-LD-Orn-K(ϵKϵK-(γGlu)-CO- | 67 | 276 | 935 |
| | | | (CH₂)₁₆-CO₂H)AQ-Aib-EFIQ-αMeY-LLEGSPSSGAPPPSK(PEG₂₄-BEA- | | | |
| | | | MalDap₂-Fc)-NH₂ | | | |
| 183 | 15 | 641 | Y-Aib-EGT-αMeF(2F)-TSD-4Pal-SI-αMeL-LD-Orn-K(2-[2-(2-amino- | 58 | 262 | 935 |
| | | | ethoxy)-ethoxy]-acetyl)₂-(γGlu)-CO-(CH₂)₁₆-CO₂H)AQ-Aib-EFIQ-αMeY- | | | |
| | | | LIEGSPSSGAPPPSK(2-[2-(2-amino-ethoxy)-ethoxy]-acetyl)₆- | | | |
| | | | GPAPAPAPAPAPA-BEA-MalDap₂-Fc)-NH₂ | | | |
| 184 | 16 | 642 | Y-Aib-EGT-αMeF(2F)-TSD-4Pal-SI-αMeL-LD-Orn-K(2-[2-(2-amino- | 58 | 262 | 935 |
| | | | ethoxy)-ethoxy]-acetyl)₂-(γGlu)-CO-(CH₂)₁₆-CO₂H)AQ-Aib-EFIQ-αMeY- | | | |
| | | | LIEGSPSSGAPPPSK(2-[2-(2-amino-ethoxy)-ethoxy]-acetyl)₆-BEA- | | | |
| | | | MalDap₂-Fc)-NH₂ | | | |
| 185 | 17 | 643 | Y-Aib-EGT-αMeF(2F)-TSD-4Pal-SI-αMeL-LD-Orn-K(ϵKϵK-(γGlu)-CO- | 58 | 263 | 935 |
| | | | (CH2)16-CO2H)AQ-Aib-EFIQ-αMeY-LIEGSPSSGAPPPSK(2-[2-(2-amino- | | | |
| | | | ethoxy)-ethoxy]-acetyl)6-BEA-MalDap2-Fc)-NH2 | | | |
| 186 | | 644 | Y-Aib-EGT-αMeF(2F)-TSD-4Pal-SI-αMeL-LD-Orn-K(2-[2-(2-amino- | 21 | 208 | 935 |
| | | | ethoxy)-ethoxy]-acetyl)₂-(γGlu)-CO-(CH₂)₁₆-CO₂H)AQ-Aib-EFIE-αMeY- | | | |
| | | | LIEGGGGGGGSGGGGSGAPAPAPAPAPAPK(BEA-MalDap₂-Fc)-NH₂ | | | |
| 187 | 18 | 645 | Y-Aib-EGT-αMeF(2F)-TSD-4Pal-SI-αMeL-LD-Orn-K(2-[2-(2-amino- | 68 | 277 | 935 |
| | | | ethoxy)-ethoxy]-acetyl)₂-(γGlu)-CO-(CH₂)₁₆-CO₂H)AQ-Aib-EFIQ-αMeY- | | | |
| | | | LIEGGGGGGGSGGGGSGGGGSK(BEA-MalDap₂-Fc)-NH₂ | | | |
| 188 | 19 | 646 | Y-Aib-EGT-αMeF(2F)-TSD-4Pal-SI-αMeL-LD-Orn-K(2-[2-(2-amino- | 68 | 277 | 935 |
| | | | ethoxy)-ethoxy]-acetyl)₂-(γGlu)-CO-(CH₂)₁₆-CO₂H)AQ-Aib-EFIQ-αMeY- | | | |
| | | | LIEGGGGGGGSGGGGSGAPAPAPAPAPAPK(BEA-MalDap₂-Fc)-NH₂ | | | |
| 189 | | 647 | Y-Aib-EGT-αMeF(2F)-TSD-4Pal-SI-αMeL-LD-Orn-K(ϵKϵK-(γGlu)-CO- | 21 | 278 | 935 |
| | | | (CH₂)₁₆-CO₂H)AQ-Aib-EFIE-αMeY- | | | |
| | | | LIEGGGGGGGSGGGGSGGGGSK(BEA-MalDap₂-Fc)-NH₂ | | | |
| 190 | | 648 | Y-Aib-EGT-αMeF(2F)-TSD-4Pal-SI-αMeL-LD-Orn-K(ϵKϵK-(γGlu)-CO- | 68 | 279 | 935 |
| | | | (CH₂)₁₆-CO₂H)AQ-Aib-EFIQ-αMeY- | | | |
| | | | LIEGGGGGGGSGGGGSGGGGSK(BEA-MalDap₂-Fc)-NH₂ | | | |
| 191 | | 649 | Y-Aib-EGT-αMeF(2F)-TSD-4Pal-SI-αMeL-LD-Orn-K(ϵKϵK-(γGlu)-CO- | 68 | 279 | 935 |
| | | | (CH₂)₁₆-CO₂H)AQ-Aib-EFIQ-αMeY- | | | |
| | | | LIEGGGGGGGSGGGGSGAPAPAPAPAPAPK(BEA-MalDap2-Fc)-NH₂ | | | |
| 192 | | 650 | Y-Aib-EGT-αMeF(2F)-TSD-4Pal-Aib-I-αMeL-LD-Orn-K(2-[2-(2-amino- | 54 | 254 | 935 |
| | | | ethoxy)-ethoxy]-acetyl)₂-(γGlu)-CO-(CH₂)₁₆-CO₂H)AQ-Aib-EFIQ-αMeY- | | | |
| | | | LIEGSPSSGAPPPSK(2-[2-(2-amino-ethoxy)-ethoxy]-acetyl)₆- | | | |
| | | | GPAPAPAPAPAPA-BEA-MalDap₂-Fc)-NH₂ | | | |
| 193 | | 651 | Y-Aib-EGT-αMeF(2F)-TSD-4Pal-Aib-I-αMeL-LD-Orn-K(2-[2-(2-amino- | 54 | 254 | 935 |
| | | | ethoxy)-ethoxy]-acetyl)₂-(γGlu)-CO-(CH₂)₁₆-CO₂H)AQ-Aib-EFIQ-αMeY- | | | |
| | | | LIEGSPSSGAPPPSK(2-[2-(2-amino-ethoxy)-ethoxy]-acetyl)₆-BEA- | | | |
| | | | MalDap₂-Fc)-NH₂ | | | |
| 194 | | 652 | Y-Aib-EGT-αMeF(2F)-TSD-4Pal-Aib-I-αMeL-LD-Orn-K(2-[2-(2-amino- | 22 | 209 | 935 |
| | | | ethoxy)-ethoxy]-acetyl)₂-(γGlu)-CO-(CH₂)₁₆-CO₂H)AQ-Aib-EFIE-αMeY- | | | |
| | | | LIEGGGGGGGSGGGGSGAPAPAPAPAPAPK(BEA-MalDap₂-Fc)-NH₂ | | | |
| 195 | | 653 | Y-Aib-EGT-αMeF(2F)-TSD-4Pal-Aib-I-αMeL-LD-Orn-K(2-[2-(2-amino- | 69 | 280 | 935 |
| | | | ethoxy)-ethoxy]-acetyl)₂-(γGlu)-CO-(CH₂)₁₆-CO₂H)AQ-Aib-EFIQ-αMeY- | | | |
| | | | LIEGGGGGGGSGGGGSGGGGSK(BEA-MalDap₂-Fc)-NH₂ | | | |
| 196 | | 654 | Y-Aib-EGT-αMeF(2F)-TSD-4Pal-Aib-I-αMeL-LD-Orn-K(2-[2-(2-amino- | 69 | 280 | 935 |
| | | | ethoxy)-ethoxy]-acetyl)₂-(γGlu)-CO-(CH₂)₁₆-CO₂H)AQ-Aib-EFIQ-αMeY- | | | |
| | | | LIEGGGGGGGSGGGGSGAPAPAPAPAPAPK(BEA-MalDap₂-Fc)-NH₂ | | | |
| 197 | | 655 | Y-Aib-EGT-αMeF(2F)-TSD-4Pal-Aib-I-αMeL-LD-Orn-K(2-[2-(2-amino- | 70 | 281 | 935 |
| | | | ethoxy)-ethoxy]-acetyl)₂-(γGlu)-CO-(CH₂)₁₆-CO₂H)AQ-Aib-DFIQ-αMeY- | | | |
| | | | LIEGSPSSGAPPPSK(2-[2-(2-amino-ethoxy)-ethoxy]-acetyl)₆-BEA- | | | |
| | | | MalDap2-Fc)-NH2 | | | |
| 198 | | 656 | Y-Aib-EGT-αMeF(2F)-TSD-4Pal-SI-αMeL-LD-Orn-K(2-[2-(2-amino- | 71 | 282 | 935 |
| | | | ethoxy)-ethoxy]-acetyl)2-(γGlu)-CO-(CH2)16-CO2H)AQ-Aib-EFIK(PEG₂₄- | | | |
| | | | BEA-MalDap₂-Fc)-αMeY-LIEGSPSSGAPPPS-NH₂ | | | |
| 199 | | 657 | Y-Aib-EGT-αMeF(2F)-TSD-4Pal-Aib-I-αMeL-LD-Orn-K(2-[2-(2-amino- | 72 | 283 | 935 |
| | | | ethoxy)-ethoxy]-acetyl)₂-(γGlu)-CO-(CH₂)₁₆-CO₂H)AQ-Aib-EFIK(PEG₂₄- | | | |
| | | | BEA-MalDap₂-Fc)-αMeY-LIEGSPSSGAPPPS-NH₂ | | | |
| 200 | | 658 | Y-Aib-EGT-αMeF(2F)-TSD-4Pal-SI-αMeL-LD-Orn-K(2-[2-(2-amino- | 71 | 282 | 935 |
| | | | ethoxy)-ethoxy]-acetyl)₂-(γGlu)-CO-(CH₂)₁₆-CO₂H)AQ-Aib-EFIK(2-[2-(2- | | | |
| | | | amino-ethoxy)-ethoxy]-acetyl)(-BEA-MalDap₂-Fc)-αMeY- | | | |
| | | | LIEGSPSSGAPPPS-NH₂ | | | |
| 201 | | 659 | Y-Aib-EGT-αMeF(2F)-TSD-4Pal-Aib-I-αMeL-LD-Orn-K(2-[2-(2-amino- | 72 | 283 | 935 |
| | | | ethoxy)-ethoxy]-acetyl)₂-(γGlu)-CO-(CH₂)₁₆-CO₂H)AQ-Aib-EFIK(2-[2-(2- | | | |
| | | | amino-ethoxy)-ethoxy]-acetyl)(-BEA-MalDap₂-Fc)-αMeY- | | | |
| | | | LIEGSPSSGAPPPS-NH₂ | | | |
| 202 | | 660 | Y-Aib-EGT-αMeF(2F)-TSD-4Pal-Aib-I-αMeL-LD-Orn-K(eK-(2-[2-(2- | 54 | 284 | 935 |
| | | | amino-ethoxy)-ethoxy]-acetyl)-(γGlu)-CO-(CH₂)₆-CO₂H)AQ-Aib-EFIQ- | | | |
| | | | αMeY-LIEGSPSSGAPPPSK(2-[2-(2-amino-ethoxy)-ethoxy]-acetyl)₆-BEA- | | | |
| | | | MalDap₂-Fc)-NH₂ | | | |
| 203 | | 661 | Y-Aib-EGT-αMeF(2F)-TSD-4Pal-Aib-I-αMeL-LD-Orn-K(2-[2-(2-amino- | 54 | 285 | 935 |
| | | | ethoxy)-ethoxy]-acetyl)-eK-(γGlu)-CO-(CH₂)₁₆-CO₂H)AQ-Aib-EFIQ-αMeY- | | | |
| | | | LIEGSPSSGAPPPSK(2-[2-(2-amino-ethoxy)-ethoxy]-acetyl)₆-BEA- | | | |
| | | | MalDap₂-Fc)-NH₂ | | | |
| 204 | 20 | 662 | Y-Aib-EGT-αMeF(2F)-TSD-4Pal-Aib-I-αMeL-LD-Orn-K(ϵKϵK-(γGlu)-CO- | 47 | 241 | 935 |
| | | | (CH₂)₁₆-CO2H)AQ-Aib-EFIE-αMeY-LIEGSPSSGAPPPSK(2-[2-(2-amino- | | | |
| | | | ethoxy)-ethoxy]-acetyl)₆-BEA-MalDap₂-Fc)-NH₂ | | | |
| 205 | | 663 | Y-Aib-EGT-αMeF(2F)-TSD-4Pal-SI-αMeL-LD-Orn-K(ϵKϵK-(γGlu)-CO- | 55 | 257 | 935 |
| | | | (CH₂)₁₆-CO₂H)AQ-Aib-EFIE-αMeY-LIEGSPSSGAPPPSK(2-[2-(2-amino- | | | |
| | | | ethoxy)-ethoxy]-acetyl)₆-BEA-MalDap₂-Fc)-NH₂ | | | |
| 206 | | 664 | Y-Aib-EGT-αMeF(2F)-TSDY-Aib-I-αMeL-LD-Orn-K(2-[2-(2-amino- | 59 | 264 | 935 |
| | | | ethoxy)-ethoxy]-acetyl)₂-(γGlu)-CO-(CH₂)₁₆-CO₂H)AQ-Aib-EFIE-αMeY- | | | |
| | | | LIEGSPSSGAPPPSK(2-[2-(2-amino-ethoxy)-ethoxy]-acetyl)₆-BEA- | | | |
| | | | MalDap₂-Fc)-NH₂ | | | |
| 207 | | 665 | Y-Aib-EGT-αMeF(2F)-TSDY-Aib-I-αMeL-LD-Orn-K(2-[2-(2-amino- | 60 | 265 | 935 |
| | | | ethoxy)-ethoxy]-acetyl)₂-(γGlu)-CO-(CH₂)₁₆-CO₂H)AQ-Aib-EFIQ-αMeY- | | | |
| | | | LIEGSPSSGAPPPSK(2-[2-(2-amino-ethoxy)-ethoxy]-acetyl)₆-BEA- | | | |
| | | | MalDap₂-Fc)-NH₂ | | | |
| 208 | | 666 | Y-Aib-EGT-αMeF(2F)-TSDY-Aib-I-αMeL-LD-Orn-K(ϵKϵK-(γGlu)-CO- | 59 | 267 | 935 |
| | | | (CH₂)₁₆-CO₂H)AQ-Aib-EFIE-αMeY-LIEGSPSSGAPPPSK(2-[2-(2-amino- | | | |
| | | | ethoxy)-ethoxy]-acetyl)₆-BEA-MalDap₂-Fc)-NH₂ | | | |
| 209 | | 667 | Y-Aib-EGT-αMeF(2F)-TSDY-Aib-I-αMeL-LD-Orn-K(ϵKϵK-(γGlu)-CO- | 60 | 268 | 935 |
| | | | (CH₂)₁₆-CO₂H)AQ-Aib-EFIQ-αMeY-LIEGSPSSGAPPPSK(2-[2-(2-amino- | | | |
| | | | ethoxy)-ethoxy]-acetyl)₆-BEA-MalDap₂-Fc)-NH₂ | | | |
| 210 | | 668 | Y-Aib-EGT-αMeF(2F)-TSDYSI-αMeL-LD-Orn-K(2-[2-(2-amino-ethoxy)- | 73 | 286 | 935 |
| | | | ethoxy]-acetyl)₂-(γGlu)-CO-(CH₂)₁₆-CO₂H)AQ-Aib-EFIE-αMeY- | | | |
| | | | LIEGSPSSGAPPPSK(2-[2-(2-amino-ethoxy)-ethoxy]-acetyl)₆-BEA- | | | |
| | | | MalDap₂-Fc)-NH₂ | | | |
| 211 | | 669 | Y-Aib-EGT-αMeF(2F)-TSDYSI-αMeL-LD-Orn-K(2-[2-(2-amino-ethoxy)- | 74 | 287 | 935 |
| | | | ethoxy]-acetyl)₂-(γGlu)-CO-(CH₂)₁₆-CO₂H)AQ-Aib-EFIQ-αMeY- | | | |
| | | | LIEGSPSSGAPPPSK(2-[2-(2-amino-ethoxy)-ethoxy]-acetyl)₆-BEA- | | | |
| | | | MalDap₂-Fc)-NH₂ | | | |
| 212 | | 670 | Y-Aib-EGT-αMeF(2F)-TSDYSI-αMeL-LD-Orn-K(ϵKϵK-(γGlu)-CO-(CH₂)₁₆- | 73 | 288 | 935 |
| | | | CO₂H)AQ-Aib-EFIE-αMeY-LIEGSPSSGAPPPSK(2-[2-(2-amino-ethoxy)- | | | |
| | | | ethoxy]-acetyl)₆-BEA-MalDap₂-Fc)-NH₂ | | | |
| 213 | | 671 | Y-Aib-EGT-αMeF(2F)-TSDYSI-αMeL-LD-Orn-K(ϵKϵK-(γGlu)-CO-(CH₂)₁₆- | 74 | 289 | 935 |
| | | | CO₂H)AQ-Aib-EFIQ-αMeY-LIEGSPSSGAPPPSK(2-[2-(2-amino-ethoxy)- | | | |
| | | | ethoxy]-acetyl)₆-BEA-MalDap₂-Fc)-NH₂ | | | |
| 214 | | 672 | Y-Aib-EGT-αMeF(2F)-TSD-4Pal-Aib-I-αMeL-LD-Orn-K(ϵKϵK-(γGlu)-CO- | 69 | 290 | 935 |
| | | | (CH₂)₁₆-CO2H)AQ-Aib-EFIQ-αMeY- | | | |
| | | | LIEGGGGGGGQGGGGQGGGGQK(BEA-MalDap₂-Fc)-NH₂ | | | |
| 215 | | 673 | Y-Aib-EGT-αMeF(2F)-TSD-4Pal-SI-αMeL-LD-Orn-K(ϵKϵK-(γGlu)-CO- | 68 | 279 | 935 |
| | | | (CH₂)₁₆-CO₂H)AQ-Aib-EFIQ-αMeY- | | | |
| | | | LIEGGGGGGGQGGGGQGGGGQK(BEA-MalDap₂-Fc)-NH₂ | | | |
| 216 | | 674 | Y-Aib-EGT-αMeF(2F)-TSDY-Aib-I-αMeL-LD-Orn-K(2-[2-(2-amino- | 75 | 292 | 935 |
| | | | ethoxy)-ethoxy]-acetyl)₂-(γGlu)-CO-(CH₂)₁₆-CO₂H)AQ-Aib-EFIE-αMeY- | | | |
| | | | LIEGGGGGGGSGGGGSGGGGSK(BEA-MalDap₂-Fc)-NH₂ | | | |
| 217 | | 675 | H-Aib-EGT-αMeF(2F)-TSD-4Pal-SI-αMeL-LD-Orn-K(2-[2-(2-amino- | 76 | 293 | 935 |
| | | | ethoxy)-ethoxy]-acetyl)₂-(γGlu)-CO-(CH₂)₁₆-CO₂H)AQ-Aib-EFIE-αMeY- | | | |
| | | | LIEGGGGGGGSGGGGSGGGGSK(BEA-MalDap₂-Fc)-NH₂ | | | |
| 218 | | 676 | H-Aib-EGT-αMeF(2F)-TSD-4Pal-SI-αMeL-LD-Orn-K(ϵKϵK-(γGlu)-CO- | 77 | 294 | 935 |
| | | | (CH₂)₁₆-CO₂H)AQ-Aib-EFIE-αMeY-LIEGSPSSGAPPPSK(PEG₂₄-BEA- | | | |
| | | | MalDap₂-Fc)-NH₂ | | | |
| 219 | | 677 | Y-Aib-EGT-αMeF(2F)-TSD-4Pal-Aib-I-αMeL-LD-Orn-K(2-12-(2-amino- | 78 | 295 | 935 |
| | | | ethoxy)-ethoxy]-acetyl)₂-(γGlu)-CO-(CH₂)₁₆-CO₂H)AQ-Aib-EFIE-αMeY- | | | |
| | | | LIEQGGGGGGSGGGGSGGGGSK(BEA-MalDap₂-Fc)-NH₂ | | | |
| 220 | | 678 | Y-Aib-EGT-αMeF(2F)-TSD-4Pal-SI-αMeL-LD-Orn-K(ϵKϵK-(γGlu)-CO- | 79 | 296 | 935 |
| | | | (CH₂)₁₆-CO₂H)AQ-Aib-EFIe-αMeY-LIEGGPSSGAPPPSK(PEG₂₄-BEA- | | | |
| | | | MalDap₂-Fc)-NH₂ | | | |
| 221 | | 679 | Y-Aib-EGT-αMeF(2F)-TSD-4Pal-Aib-I-αMeL-LD-Orn-K(ϵKϵK-(γGlu)-CO- | 80 | 297 | 935 |
| | | | (CH₂)₁₆-CO₂H)AQ-Aib-EFIe-αMeY-LIEGGPSSGAPPPSK(PEG₂₄-BEA- | | | |
| | | | MalDap₂-Fc)-NH₂ | | | |
| 222 | | 680 | Y-Aib-EGT-αMeF(2F)-TSDY-Aib-I-αMeL-LD-Orn-K(2-[2-(2-amino- | 81 | 298 | 935 |
| | | | ethoxy)-ethoxy]-acetyl)₂-(γGlu)-CO-(CH₂)₁₆-CO₂H)AQ-Aib-EFIe-αMeY- | | | |
| | | | LIEGGPSSGAPPPSK(PEG₂₄-BEA-MalDap₂-Fc)-NH₂ | | | |
| 223 | | 681 | Y-Aib-EGT-αMeF(2F)-TSDY-Aib-I-αMeL-LD-Orn-K(ϵKϵK-(γGlu)-CO- | 81 | 299 | 935 |
| | | | (CH₂)₁₆-CO₂H)AQ-Aib-EFIe-αMeY-LIEGGPSSGAPPPSK(PEG₂₄-BEA- | | | |
| | | | MalDap₂-Fc)-NH₂ | | | |
| 224 | | 682 | Y-Aib-EGT-αMeF(2F)-TSD-4Pal-SI-αMeL-LD-Orn-K(2-[2-(2-amino- | 82 | 300 | 935 |
| | | | ethoxy)-ethoxy]-acetyl)₂-(γGlu)-CO-(CH₂)₁₆-CO₂H)AQ-Aib-EFIe-αMeY- | | | |
| | | | LIAGSPSSGAPPPSK(PEG₂₄-BEA-MalDap₂-Fc)-NH₂ | | | |
| 225 | | 683 | Y-Aib-EGT-αMeF(2F)-TSD-4Pal-SI-αMeL-LD-Orn-K(ϵKϵK-(γGlu)-CO- | 82 | 301 | 935 |
| | | | (CH₂)₁₆-CO₂H)AQ-Aib-EFIe-αMeY-LIAGSPSSGAPPPSK(PEG₂₄-BEA- | | | |
| | | | MalDap₂-Fc)-NH₂ | | | |
| 226 | | 684 | Y-Aib-EGT-aMcF(2F)-TSD-4Pal-Aib-I-αMeL-LD-Orn-K(ϵKϵK-(γGlu)-CO- | 83 | 302 | 935 |
| | | | (CH₂)₁₆-CO₂H)AQ-Aib-EFIe-αMeY-LIAGSPSSGAPPPSK(PEG₂₄-BEA- | | | |
| | | | MalDap₂-Fc)-NH₂ | | | |
| 227 | | 685 | Y-Aib-EGT-αMeF(2F)-TSDY-Aib-I-αMeL-LD-Orn-K(2-[2-(2-amino- | 84 | 303 | 935 |
| | | | ethoxy)-ethoxy]-acetyl)₂-(γGlu)-CO-(CH₂)₁₆-CO₂H)AQ-Aib-EFIe-αMeY- | | | |
| | | | LIAGSPSSGAPPPSK(PEG₂₄-BEA-MalDap₂-Fc)-NH₂ | | | |
| 228 | | 686 | Y-Aib-EGT-αMeF(2F)-TSDY-Aib-I-αMeL-LD-Orn-K(ϵKϵK-(γGlu)-CO- | 84 | 304 | 935 |
| | | | (CH₂)₁₆-CO₂H)AQ-Aib-EFIe-αMeY-LIAGSPSSGAPPPSK(PEG₂₄-BEA- | | | |
| | | | MalDap₂-Fc)-NH₂ | | | |
| 229 | | 687 | Y-Aib-EGT-αMeF(2F)-TSD-4Pal-SI-αMeL-LD-Orn-K(ϵKϵK-(γGlu)-CO- | 85 | 305 | 935 |
| | | | (CH₂)₁₆-CO₂H)AQ-Aib-EFIe-αMeY-LIAGGPSSGAPPPSK(PEG₂₄-BEA- | | | |
| | | | MalDap₂-Fc)-NH₂ | | | |
| 230 | | 688 | Y-Aib-EGT-αMeF(2F)-TSD-4Pal-SI-αMeL-LD-Orn-K(2-[2-(2-amino- | 85 | 306 | 935 |
| | | | ethoxy)-ethoxy]-acetyl)₂-(γGlu)-CO-(CH₂)₁₆-CO₂H)AQ-Aib-EFIe-αMeY- | | | |
| | | | LIAGGPSSGAPPPSK(PEG₂₄-BEA-MalDap₂-Fc)-NH₂ | | | |
| 231 | | 689 | Y-Aib-EGT-αMeF(2F)-TSDY-Aib-I-αMeL-LD-Orn-K(ϵKϵK-(γGlu)-CO- | 86 | 307 | 935 |
| | | | (CH₂)₁₆-CO₂H)AQ-Aib-EFIe-αMeY-LIAGGPSSGAPPPSK(PEG₂₄-BEA- | | | |
| | | | MalDap₂-Fc)-NH₂ | | | |
| 232 | | 690 | Y-Aib-EGT-αMeF(2F)-TSDY-Aib-I-αMeL-LD-Orn-K(2-[2-(2-amino- | 86 | 308 | 935 |
| | | | ethoxy)-ethoxy]-acetyl)₂-(γGlu)-CO-(CH₂)₁₆-CO₂H)AQ-Aib-EFIe-αMeY- | | | |
| | | | LIAGGPSSGAPPPSK(PEG₂₄-BEA-MalDap₂-Fc)-NH₂ | | | |
| 233 | | 69 | Y-Aib-EGT-αMeF(2F)-TSD-4Pal-SI-αMeL-LD-Orn-K(2-[2-(2-amino- | 2 | 309 | 935 |
| | | | ethoxy)-ethoxy]-acetyl)-(γGlu)-CO-(CH₂)₁₆-CO₂H)AQ-Aib-EFIe-αMeY- | | | |
| | | | LIEGSPSSGAPPPSK(PEG₂₄-BEA-MalDap₂-Fc)-NH₂ | | | |
| 234 | | 692 | Y-Aib-EGT-αMeF(2F)-TSDY-Aib-I-αMeL-LD-Orn-K(2-[2-(2-amino- | 61 | 310 | 935 |
| | | | ethoxy)-ethoxy]-acetyl)-(γGlu)-CO-(CH₂)16-CO₂H)AQ-Aib-EFIe-αMeY- | | | |
| | | | LIEGSPSSGAPPPSK(PEG₂₄-BEA-MalDap₂-Fc)-NH₂ | | | |
| 235 | | 693 | Y-Aib-EGT-αMeF(2F)-TSD-4Pal-SI-αMeL-LD-Orn-K(ϵKϵK-(γGlu)-CO- | 87 | 311 | 935 |
| | | | (CH₂)₁₆-CO₂H)AQ-Aib-EFIe-αMeY-LVEGSPSSGAPPPSK(PEG₂₄-BEA- | | | |
| | | | MalDap₂-Fc)-NH₂ | | | |
| 236 | | 694 | Y-Aib-EGT-αMeF(2F)-TSD-4Pal-SI-αMeL-LD-Orn-K(2-[2-(2-amino- | 88 | 312 | 935 |
| | | | ethoxy)-ethoxy]-acetyl)₂-(γGlu)-CO-(CH₂)₁₆-CO₂H)AQ-Aib-EFIE-αMeY- | | | |
| | | | LIAGSPSSGAPPPSK(PEG₂₄-BEA-MalDap₂-Fc)-NH₂ | | | |
| 237 | | 695 | Y-Aib-EGT-αMeF(2F)-TSD-4Pal-SI-αMeL-LD-Orn-K(ϵKϵK-(γGlu)-CO- | 88 | 313 | 935 |
| | | | (CH₂)₁₆-CO₂H)AQ-Aib-EFIE-αMeY-LIAGSPSSGAPPPSK(PEG₂₄-BEA- | | | |
| | | | MalDap₂-Fc)-NH₂ | | | |
| 238 | | 696 | Y-Aib-EGT-αMeF(2F)-TSDY-Aib-I-αMeL-LD-Orn-K(2-[2-(2-amino- | 89 | 314 | 935 |
| | | | ethoxy)-ethoxy]-acetyl)₂-(γGlu)-CO-(CH₂)₁₆-CO₂H)AQ-Aib-EFIE-αMeY- | | | |
| | | | LIAGSPSSGAPPPSK(PEG₂₄-BEA-MalDap₂-Fc)-NH₂ | | | |
| 239 | | 697 | Y-Aib-EGT-αMeF(2F)-TSDY-Aib-I-αMeL-LD-Orn-K(ϵKϵK-(γGlu)-CO- | 89 | 315 | 935 |
| | | | (CH₂)₁₆-CO₂H)AQ-Aib-EFIE-αMeY-LIAGSPSSGAPPPSK(PEG₂₄-BEA- | | | |
| | | | MalDap₂-Fc)-NH₂ | | | |
| 480 | 22 | 698 | Y-Aib-EGT-αMeF(2F)-TSD-4Pal-SI-αMeL-LD-Orn-K(ϵKK-(γGlu)-CO- | 2 | 258 | 935 |
| | | | (CH₂)₁₆-CO₂H)AQ-Aib-EFIe-αMeY-LIEGSPSSGAPPPSK(PEG₂₄-BEA- | | | |
| | | | MSPT2-Fc)-NH₂ | | | |
| 481 | 23 | 699 | Y-Aib-EGT-αMeF(2F)-TSD-4Pal-SI-αMeL-LD-Orn-K(γGlu-(γGlu)-CO- | 2 | 258 | 935 |
| | | | (CH₂)₁₆-CO₂H)AQ-Aib-EFIe-αMeY-LIEGSPSSGAPPPSK(PEG₂₄-BEA- | | | |
| | | | Acetyl2-Fc)-NH₂ | | | |
| 482 | 24 | 700 | Y-Aib-EGT-αMeF(2F)-TSD-4Pal-SI-αMeL-LD-Orn-K(γGlu-(γGlu)-CO- | 2 | 258 | 935 |
| | | | (CH₂)₁₆-CO₂H)AQ-Aib-EFIe-αMeY-LIEGSPSSGAPPPSK(PEG₂₄-BEA-OD2- | | | |
| | | | Fc)-NH₂ | | | |
| 243 | | 701 | Y-Aib-EGT-αMeF(2F)-TSD-4Pal-SI-αMeL-LDEK(Ac)AQ-Aib-EFIe-αMeY- | 1 | 316 | 935 |
| | | | LIEGSPSSGAPPPSK(PEG₂₄-BEA-MalDap₂-Fc)-NH₂ | | | |
| 244 | | 702 | Y-Aib-EGT-αMeF(2F)-TSD-4Pal-SI-αMeL-LDEQAQ-Aib-EFIe-αMeY- | 90 | 317 | 935 |
| | | | LIEGSPSSGAPPPSK(PEG₂₄-BEA-MalDap₂-Fc)-NH₂ | | | |
| 245 | | 703 | Y-Aib-EGT-αMeF(2F)-TSD-4Pal-SI-αMeL-LDEQAQ-Aib-EFIe-αMeY- | 90 | 317 | 936 |
| | | | LIEGSPSSGAPPPSK(PEG₂₄-BEA-MalDap₂-Fc KRQ)-NH₂ | | | |
| 246 | | 704 | Y-Aib-EGT-αMeF(2F)-TSD-4Pal-SI-αMeL-LD-Orn-K(2-[2-(2-amino- | 2 | 318 | 935 |
| | | | ethoxy)-ethoxy]-acetyl)₂-(γGlu)-CO-(CH₂)₁₈-CO₂H)AQ-Aib-EFIe-αMeY- | | | |
| | | | LIEGSPSSGAPPPSK(PEG24-BEA-MalDap2-Fc)-NH₂ | | | |
| 247 | | 705 | Y-Aib-EGT-αMeF(2F)-TSD-4Pal-SI-αMeL-LD-Orn-K(2-[2-(2-amino- | 2 | 319 | 935 |
| | | | ethoxy)-ethoxy]-acetyl)₂-(γGlu)-CO-(CH₂)₁₄-CO₂H)AQ-Aib-EFIe-αMeY- | | | |
| | | | LIEGSPSSGAPPPSK(PEG₂₄-BEA-MalDap₂-Fc)-NH₂ | | | |
| 248 | | 706 | Y-Aib-EGT-αMeF(2F)-TSD-4Pal-SI-αMeL-LDEK(2-[2-(2-amino-ethoxy)- | 1 | 320 | 935 |
| | | | ethoxy]-acetyl)₂-(γGlu)-CO-(CH₂)₁₄-CO₂H)AQ-Aib-EFIe-αMeY- | | | |
| | | | LIEGSPSSGAPPPSK(PEG₂₄-BEA-MalDap₂-Fc)-NH₂ | | | |
| 249 | | 707 | Y-Aib-EGT-aMcF(2F)-TSD-4Pal-SI-αMeL-LD-Orn-K(γGlu-(γGlu)-CO- | 2 | 321 | 935 |
| | | | (CH₂)₁₈-CO₂H)AQ-Aib-EFIe-αMeY-LIEGSPSSGAPPPSK(PEG2₄-BEA- | | | |
| | | | MalDap₂-Fc)-NH₂ | | | |
| 250 | | 708 | Y-Aib-EGT-αMeF(2F)-TSD-4Pal-SI-αMeL-LDEK(γGlu-(γGlu)-CO- | 1 | 322 | 935 |
| | | | (CH₂)₁₈-CO₂H)AQ-Aib-EFIe-αMeY-LIEGSPSSGAPPPSK(PEG₂₄-BEA- | | | |
| | | | MalDap₂-Fc)-NH₂ | | | |
| 251 | | 709 | Y-Aib-EGT-αMeF(2F)-TSD-4Pal-SI-αMeL-LD-Orn-K(2-[2-(2-amino- | 21 | 323 | 935 |
| | | | ethoxy)-ethoxy]-acetyl)₂-(γGlu)-CO-(CH₂)₁₄-CO₂H)AQ-Aib-EFIE-αMeY- | | | |
| | | | LIEGGGGGGGSGGGGSGGGGSK(BEA-MalDap₂-Fc)-NH₂ | | | |
| 252 | | 710 | Y-Aib-EGT-αMeF(2F)-TSD-4Pal-SI-αMeL-LDEK(γGlu-(2-[2-(2-amino- | 1 | 324 | 935 |
| | | | ethoxy)-ethoxy]-acetyl)-ϵK-CO-(CH₂)₁₈-CO₂H)AQ-Aib-EFIe-αMeY- | | | |
| | | | LIEGSPSSGAPPPS-K(PEG₂₄-BEA-MalDap₂-Fc)-NH₂ | | | |
| 253 | | 711 | Y-Aib-EGT-αMeF(2F)-TSD-4Pal-Aib-I-αMeL-LD-Orn-K(2-12-(2-amino- | 22 | 325 | 935 |
| | | | ethoxy)-ethoxy]-acetyl)₂-(γGlu)-CO-(CH₂)₁₄-CO₂H)AQ-Aib-EFIE-αMeY- | | | |
| | | | LIEGGGGGGGSGGGGSGGGGSK(BEA-MalDap₂-Fc)-NH₂ | | | |
| 254 | | 712 | Y-Aib-EGT-αMeF(2F)-TSD-4Pal-Aib-I-αMeL-LD-Orn-K(2-[2-(2-amino- | 42 | 326 | 935 |
| | | | ethoxy)-ethoxy]-acetyl)₂-(γGlu)-CO-(CH₂)₁₄-CO₂H)AQ-Aib-EFIE-αMeY- | | | |
| | | | LIEGGPSSGK(PEG₂₄-BEA-MalDap₂-Fc)-NH₂ | | | |
| 255 | | 713 | Y-Aib-EGT-αMeF(2F)-TSD-4Pal-Aib-I-αMeL-LD-Orn-K(2-[2-(2-amino- | 22 | 325 | 935 |
| | | | ethoxy)-ethoxy]-acetyl)₂-(γGlu)-CO-(CH₂)₁₄-CO₂H)AQ-Aib-EFIE-αMeY- | | | |
| | | | LIEGGG-PEG₂₄-K(BEA-MalDap₂-Fc)-NH₂ | | | |
| 256 | | 714 | Y-Aib-EGT-αMeF(2F)-TSD-4Pal-Aib-I-αMeL-LD-Orn-K(2-[2-(2-amino- | 22 | 325 | 935 |
| | | | ethoxy)-ethoxy]-acetyl)₂-(γGlu)-CO-(CH₂)₁₄-CO₂H)AQ-Aib-EFIE-αMeY- | | | |
| | | | LIEGGGK(PEG₂₄-BEA-MalDap₂-Fc)-NH₂ | | | |
| 257 | | 715 | Y-Aib-EGT-αMeF(2F)-TSD-4Pal-Aib-I-αMeL-LDEK(γGlu-(γGlu)-CO- | 91 | 327 | 935 |
| | | | (CH₂)₁₄-CO₂H)AQ-Aib-EFIE-αMeY-LIEGGPSSGK(PEG₂₄-BEA-MalDap₂- | | | |
| | | | Fc)-NH₂ | | | |
| 258 | | 716 | Y-Aib-EGT-αMeF(2F)-TSD-4Pal-Aib-I-αMeL-LDEK(γGlu-(γGlu)-CO- | 16 | 328 | 935 |
| | | | (CH₂)₁₄-CO₂H)AQ-Aib-EFIE-αMeY-LIEGGG-PEG₂₄-K(BEA-MalDap₂-Fc)- | | | |
| | | | NH₂ | | | |
| 259 | | 717 | Y-Aib-EGT-αMeF(2F)-TSD-4Pal-Aib-I-αMeL-LDEK(ϵKϵK-(γGlu)-CO- | 16 | 328 | 935 |
| | | | (CH₂)₁₄-CO₂H)AQ-Aib-EFIE-αMeY-LIEGGGK(PEG₂₄-BEA-MalDap₂-Fc)- | | | |
| | | | NH₂ | | | |
| 260 | | 718 | Y-Aib-EGT-αMeF(2F)-TSD-4Pal-SI-αMeL-LDEK(2-[2-(2-amino-ethoxy)- | 15 | 329 | 935 |
| | | | ethoxy]-acetyl)₂-(γGlu)-CO-(CH₂)₁₄-CO₂H)AQ-Aib-EFIE-αMeY- | | | |
| | | | LIEGGGGGGGSGGGGSGGGGSK(BEA-MalDap₂-Fc)-NH₂ | | | |
| 261 | | 719 | Y-Aib-EGT-αMeF(2F)-TSD-4Pal-SI-αMeL-LDEK(2-[2-(2-amino-ethoxy)- | 15 | 325 | 935 |
| | | | ethoxy]-acetyl)₂-γGlu-(ϵKϵK-(γGlu)-CO-(CH₂)₁₄-CO₂H))AQ-Aib-EFIE- | | | |
| | | | αMeY-LIEGGGGGGGSGGGGSGGGGSK(BEA-MalDap₂-Fc)-NH₂ | | | |
| 262 | | 720 | Y-Aib-EGT-αMeF(2F)-TSD-4Pal-SI-αMeL-LDEK(2-[2-(2-amino-ethoxy)- | 1 | 187 | 936 |
| | | | ethoxy]-acetyl)₂-(γGlu)-CO-(CH₂)₁₆-CO2H)AQ-Aib-EFIe-αMeY- | | | |
| | | | LIEGSPSSGAPPPSK((2-[2-(2-amino-ethoxy)-ethoxy]-acetyl)₄- | | | |
| | | | GKAAAEKAAAEKAAAE-BEA(MalDap₂-Fc KRQ)-NH₂ | | | |
| 263 | | 721 | Y-Aib-EGT-αMeF(2F)-TSDV-Aib-I-αMeL-LD-EK(2-[2-(2-amino-ethoxy)- | 8 | 194 | 936 |
| | | | ethoxy]-acetyl)₂-(γGlu)-CO-(CH₂)₁₆-CO2H)AQ-Aib-EFIe-αMeY- | | | |
| | | | LIEGSPSSGAPPPSK(PEG₂₄-BEA-MalDap₂-Fc KRQ)-NH₂ | | | |
| 264 | | 722 | Y-Aib-EGT-αMeF(2F)-TSD-4Pal-SI-αMeL-LDEK(2-[2-(2-amino-ethoxy)- | 11 | 197 | 935 |
| | | | ethoxy]-acetyl)₂-(γGlu)-CO-(CH₂)₁₆-CO₂H)AQ-Aib-EFIK-αMeY- | | | |
| | | | LIEGSPSSGAPPPSGS-NH₂ | | | |
| 265 | | 723 | Y-Aib-EGT-αMeF(2F)-TSD-4Pal-SI-αMeL-LDEK(2-[2-(2-amino-ethoxy)- | 3 | 189 | 936 |
| | | | ethoxy]-acetyl)₂-(γGlu)-CO-(CH₂)₁₆-CO₂H)AQ-Aib-EFIe-αMeY- | | | |
| | | | LIEGGGGGGGSGGGGSGAPAPAPAPAPAPK(BEA-MalDap₂-Fc KRQ)- | | | |
| | | | NH₂ | | | |
| 266 | | 724 | Y-Aib-EGT-αMeF(2F)-TSD-4Pal-SI-αMeL-LD-Orn-K(ϵKϵK-(γGlu)-CO- | 2 | 258 | 936 |
| | | | (CH₂)₁₆-CO₂H)AQ-Aib-EFIe-αMeY-LIEGSPSSGAPPPS-K(PEG₂₄-BEA- | | | |
| | | | MalDap₂-Fc KRQ)-NH₂ | | | |
| 267 | | 725 | Y-Aib-EGT-αMeF(2F)-TSD-V-Aib-I-αMeL-LD-Orn-K(2-12-(2-amino- | 19 | 206 | 936 |
| | | | ethoxy)-ethoxy]-acetyl)₂-(γGlu)-CO-(CH₂)₁₆-CO₂H)AQ-Aib-EFIe-αMeY- | | | |
| | | | LIEGGGGGGGSGGGGSGGGGSK(BEA-MalDap₂-Fc KRQ)-NH₂ | | | |
| 268 | | 726 | Y-Aib-EGT-αMeF(2F)-TSD-4Pal-SI-αMeL-LD-Orn-K(2-[2-(2-amino- | 21 | 208 | 936 |
| | | | ethoxy)-ethoxy]-acetyl)₂-(γGlu)-CO-(CH₂)₁₆-CO₂H)AQ-Aib-EFIE-αMeY- | | | |
| | | | LIEGGGGGGGSGGGGSGGGGSK(BEA-MalDap₂-Fc KRQ)-NH₂ | | | |
| 269 | | 727 | Y-Aib-EGT-aMcF(2F)-TSD-4Pal-SI-αMeL-LDEK(2-[2-(2-amino-cthoxy)- | 3 | 189 | 936 |
| | | | ethoxy]-acetyl)₂-(γGlu)-CO-(CH₂)₁₆-CO₂H)AQ-Aib-EFIe-αMeY- | | | |
| | | | LIEGGGGGGGSGGGGSGGGGSGAPAPAPAPAPAPK(BEA-MalDap₂-Fc | | | |
| | | | KRQ)-NH₂ | | | |
| 270 | | 728 | Y-Aib-EGT-αMeF(2F)-TSD-4Pal-SI-αMeL-LDEK(γGlu-(2-[2-(2-amino- | 1 | 324 | 936 |
| | | | ethoxy)-ethoxy]-acetyl)-ϵK-CO-(CH₂)₁₈-CO₂H)AQ-Aib-EFIe-αMeY- | | | |
| | | | LIEGSPSSGAPPPS-K(PEG₂₄-BEA-MalDap₂-Fc KRQ)-NH₂ | | | |
| 271 | | 729 | Y-Aib-EGT-αMeF(2F)-TSD-4Pal-Aib-I-αMeL-LDEK(2-[2-(2-amino- | 16 | 203 | 936 |
| | | | ethoxy)-ethoxy]-acetyl)₂-(γGlu)-CO-(CH₂)₁₆-CO₂H)AQ-Aib-EFIE-αMeY- | | | |
| | | | LIEGGGGGGGSGGGGSGGGGSGAPAPAPAPAPAPK(BEA-MalDap₂-Fc | | | |
| | | | KRQ)-NH₂ | | | |
| 272 | | 730 | Y-Aib-EGT-αMeF(2F)-TSD-4Pal-Aib-I-αMeL-LDEK(2-[2-(2-amino- | 16 | 203 | 936 |
| | | | ethoxy)-ethoxy]-acetyl)₂-(γGlu)-CO-(CH₂)₁₆-CO₂H)AQ-Aib-EFIE-αMeY- | | | |
| | | | LIEGGGGGGGSGGGGSGGGGSGEAAAKEAAAKEAAAKK(BEA- | | | |
| | | | MalDap₂-Fc KRQ)-NH₂ | | | |
| 273 | | 731 | Y-Aib-EGT-αMeF(2F)-TSD-4Pal-SI-αMeL-LEEK(2-[2-(2-amino-ethoxy)- | 17 | 204 | 936 |
| | | | ethoxy]-acetyl)₂-(γGlu)-CO-(CH₂)₁₆-CO₂H)AQ-Aib-EFIE-αMeY- | | | |
| | | | LIEGGGGGGGSGGGGSGGGGSGAPAPAPAPAPAPK(BEA-MalDap₂-Fc | | | |
| | | | KRQ)-NH₂ | | | |
| 274 | | 732 | Y-Aib-EGT-αMeF(2F)-TSD-4Pal-SI-αMeL-LEEK(2-[2-(2-amino-ethoxy)- | 17 | 204 | 936 |
| | | | ethoxy]-acetyl)₂-(γGlu)-CO-(CH₂)₁₆-CO₂H)AQ-Aib-EFIE-αMeY- | | | |
| | | | LIEGGGGGGGSGEAAAKEAAAKEAAAKK(BEA-MalDap₂-Fc KRQ)-NH₂ | | | |
| 275 | | 733 | Y-Aib-EGT-αMeF(2F)-TSD-4Pal-SI-αMeL-LEEK(2-[2-(2-amino-ethoxy)- | 17 | 204 | 936 |
| | | | ethoxy]-acetyl)₂-(γGlu)-CO-(CH₂)₁₆-CO₂H)AQ-Aib-EFIE-αMeY- | | | |
| | | | LIEGGGGGGGSGGGGSGGGGSGEPEPEPEPEPEPK(BEA-MalDap₂-Fc | | | |
| | | | KRQ)-NH₂ | | | |
| 276 | | 734 | Y-Aib-EGT-αMeF(2F)-TSD-4Pal-SI-αMeL-LEEK(2-[2-(2-amino-ethoxy)- | 17 | 204 | 936 |
| | | | ethoxy]-acetyl)₂-(γGlu)-CO-(CH₂)₁₆-CO₂H)AQ-Aib-EFIE-αMeY- | | | |
| | | | LIEGGGGGGGQGGGGQGGGGQGEPEPEPEPEPEPK(BEA-MalDap₂-Fc | | | |
| | | | KRQ)-NH₂ | | | |
| 277 | | 735 | Y-Aib-EGT-αMeF(2F)-TSD-4Pal-SI-αMeL-LE-Orn-K(2-[2-(2-amino- | 23 | 210 | 936 |
| | | | ethoxy)-ethoxy]-acetyl)₂-(γGlu)-CO-(CH₂)₁₆-CO₂H)AQ-Aib-EFIE-αMeY- | | | |
| | | | LIEGGGGGGGSGEPEPEPEPEPEPK(BEA-MalDap₂-Fc KRQ)-NH₂ | | | |
| 278 | | 736 | Y-Aib-EGT-αMeF(2F)-TSD-4Pal-SI-αMeL-LE-Orn-K(2-[2-(2-amino- | 23 | 210 | 936 |
| | | | ethoxy)-ethoxy]-acetyl)₂-(γGlu)-CO-(CH₂)₁₆-CO₂H)AQ-Aib-EFIE-αMeY- | | | |
| | | | LIEGGGGGGGSGGGGSGGGGSGEPEPEPEPEPEPK(BEA-MalDap₂-Fc | | | |
| | | | KRQ)-NH₂ | | | |
| 279 | | 737 | Y-Aib-EGT-αMeF(2F)-TSD-4Pal-SI-αMeL-LE-Orn-K(2-[2-(2-amino- | 25 | 212 | 936 |
| | | | ethoxy)-ethoxy]-acetyl)₂-(γGlu)-CO-(CH₂)₁₆-CO₂H)AQ-Aib-EFIE-αMeY- | | | |
| | | | LIEGSPSSGAPPPS-K(2-[2-(2-amino-ethoxy)-ethoxy]-acetyl)₆- | | | |
| | | | GPAPAPAPAPAPA-BEA(MalDap₂-Fc KRQ)-NH₂ | | | |
| 280 | | 738 | Y-Aib-EGT-αMeF(2F)-TSD-4Pal-Aib-I-αMeL-LD-Orn-K(2-[2-(2-amino- | 22 | 209 | 936 |
| | | | ethoxy)-ethoxy]-acetyl)₂-(γGlu)-CO-(CH₂)₁₆-CO₂H)AQ-Aib-EFIE-αMeY- | | | |
| | | | LIEGGGGGGGSGGGGSGAPAPAPAPAPAPK(BEA-MalDap₂-Fc KRQ)- | | | |
| | | | NH₂ | | | |
| 281 | | 739 | Y-Aib-EGT-αMeF(2F)-TSD-4Pal-SI-αMeL-LE-Orn-K(2-[2-(2-amino- | 23 | 210 | 936 |
| | | | ethoxy)-ethoxy]-acetyl)₂-(γGlu)-CO-(CH₂)₁₆-CO₂H)AQ-Aib-EFIE-αMeY- | | | |
| | | | LIEGGGGGGGSGGGGSGAPAPAPAPAPAPK(BEA-MalDap₂-Fc KRQ)- | | | |
| | | | NH₂ | | | |
| 282 | | 740 | Y-Aib-EGT-αMeF(2F)-TSD-4Pal-Aib-I-αMeL-LD-Orn-K(2-[2-(2-amino- | 27 | 214 | 936 |
| | | | ethoxy)-ethoxy]-acetyl)₂-(γGlu)-CO-(CH₂)₁₆-CO₂H)AQ-Aib-EFIe-αMeY- | | | |
| | | | LIEGGGGGGGSGGGGSGAPAPAPAPAPAPK(BEA-MalDap₂-Fc KRQ)- | | | |
| | | | NH₂ | | | |
| 283 | | 741 | Y-Aib-EGT-αMeF(2F)-TSD-4Pal-SI-αMeL-LD-Orn-K(2-[2-(2-amino- | 28 | 215 | 936 |
| | | | ethoxy)-ethoxy]-acetyl)₂-(γGlu)-CO-(CH₂)₁₆-CO₂H)AQ-Aib- | | | |
| | | | EFIK(GGGGSGGGGSGAPAPAPAPAPAPG-BEA-MalDap₂-Fc KRQ)- | | | |
| | | | αMeY-LIEGSPSSGAPPPSGS-NH₂ | | | |
| 284 | | 742 | Y-Aib-EGT-αMeF(2F)-TSD-4Pal-Aib-I-αMeL-LD-Orn-K(2-12-(2-amino- | 29 | 216 | 936 |
| | | | ethoxy)-ethoxy]-acetyl)₂-(γGlu)-CO-(CH₂)₁₆-CO₂H)AQ-Aib- | | | |
| | | | EFIK(GGGGSGGGGSGAPAPAPAPAPAPG-BEA-MalDap₂-Fc KRQ)- | | | |
| | | | αMeY-LIEGSPSSGAPPPSGS-NH₂ | | | |
| 285 | | 743 | Y-Aib-EGT-αMeF(2F)-TSD-4Pal-Aib-I-αMeL-LD-Orn-K(ϵKϵK-(γGlu)-CO- | 42 | 230 | 936 |
| | | | (CH₂)₁₆-CO₂H)AQ-Aib-EFIE-αMeY-LIEGGPSSGK(PEG₂₄-BEA-MalDap₂- | | | |
| | | | Fc KRQ)-NH₂ | | | |
| 286 | | 744 | Y-Aib-EGT-αMeF(2F)-TSD-4Pal-Aib-I-αMeL-LD-Orn-K(2-[2-(2-amino- | 42 | 239 | 936 |
| | | | ethoxy)-ethoxy]-acetyl)₂-(γGlu)-CO-(CH₂)₁₆-CO₂H)AQ-Aib-EFIE-αMeY- | | | |
| | | | LIEGGPSSGK(PEG₂₄-BEA-MalDap₂-Fc KRQ)-NH₂ | | | |
| 287 | | 745 | Y-Aib-EGT-αMeF(2F)-TSD-4Pal-Aib-I-αMeL-LD-Orn-K(2-[2-(2-amino- | 22 | 209 | 936 |
| | | | ethoxy)-ethoxy]-acetyl)₂-(γGlu)-CO-(CH₂)₁₆-CO₂H)AQ-Aib-EFIE-αMeY- | | | |
| | | | LIEGGG-PEG₂₄-K(BEA-MalDap₂-Fc KRQ)-NH₂ | | | |
| 288 | | 746 | Y-Aib-EGT-αMeF(2F)-TSD-4Pal-Aib-I-αMeL-LD-Orn-K(2-[2-(2-amino- | 22 | 325 | 936 |
| | | | ethoxy)-ethoxy]-acetyl)₂-(γGlu)-CO-(CH₂)₁₄-CO₂H)AQ-Aib-EFIE-αMeY- | | | |
| | | | LIEGGGGGGGSGGGGSGGGGSK(BEA-MalDap₂-Fc KRQ)-NH₂ | | | |
| 289 | | 747 | Y-Aib-EGT-αMeF(2F)-TSD-4Pal-Aib-I-αMeL-LD-Orn-K(2-[2-(2-amino- | 47 | 240 | 936 |
| | | | ethoxy)-ethoxy]-acetyl)₂-(γGlu)-CO-(CH₂)₁₆-CO₂H)AQ-Aib-EFIE-αMeY- | | | |
| | | | LIEGSPSSGAPPPSK(PEG₂₄-BEA-MalDap₂-Fc KRQ)-NH₂ | | | |
| 290 | | 748 | Y-Aib-EGT-αMeF(2F)-TSD-4Pal-Aib-I-αMeL-LD-Orn-K(ϵKϵK-(γGlu)-CO- | 47 | 241 | 936 |
| | | | (CH₂)₁₆-CO₂H)AQ-Aib-EFIE-αMeY-LIEGSPSSGAPPPSK(PEG₂₄-BEA- | | | |
| | | | MalDap₂-Fc KRQ)-NH₂ | | | |
| 291 | | 749 | Y-Aib-EGT-αMeF(2F)-TSD-4Pal-Aib-I-αMeL-LDEK(ϵKϵK-(γGlu)-CO- | 5 | 242 | 936 |
| | | | (CH₂)₁₆-CO₂H)AQ-Aib-EFIE-αMeY-LIEGSPSSGAPPPSK(PEG₂₄-BEA- | | | |
| | | | MalDap₂-Fc KRQ)-NH₂ | | | |
| 292 | | 750 | Y-Aib-EGT-αMeF(2F)-TSD-4Pal-Aib-I-αMeL-LD-Orn-K(2-[2-(2-amino- | 48 | 243 | 936 |
| | | | ethoxy)-ethoxy]-acetyl)₂-(γGlu)-CO-(CH₂)₁₆-CO₂H)AQ-Aib-EFIE-αMeY- | | | |
| | | | LIEGGPSSGAPPPSK(PEG₂₄-BEA-MalDap₂-Fc KRQ)-NH₂ | | | |
| 293 | | 751 | Y-Aib-EGT-αMeF(2F)-TSD-4Pal-Aib-I-αMeL-LD-Orn-K(ϵKϵK-(γGlu)-CO- | 48 | 244 | 936 |
| | | | (CH₂)₁₆-CO₂H)AQ-Aib-EFIE-αMeY-LIEGGPSSGAPPPSK(PEG₂₄-BEA- | | | |
| | | | MalDap₂-Fc KRQ)-NH₂ | | | |
| 294 | | 752 | Y-Aib-EGT-αMeF(2F)-TSD-4Pal-Aib-I-αMeL-LDEK(ϵKϵK-(γGlu)-CO- | 49 | 245 | 936 |
| | | | (CH₂)₁₆-CO₂H)AQ-Aib-EFIE-αMeY-LIEGGPSSGAPPPSK(PEG₂₄-BEA- | | | |
| | | | MalDap₂-Fc KRQ)-NH₂ | | | |
| 295 | | 753 | Y-Aib-EGT-αMeF(2F)-TSD-4Pal-Aib-I-αMeL-LD-Orn-K(ϵKϵK-(γGlu)-CO- | 50 | 246 | 936 |
| | | | (CH₂)₁₆-CO₂H)AQ-Aib-EFIe-αMeY-LIEGSPSSGAPPPSK(PEG₂₄-BEA- | | | |
| | | | MalDap₂ Fc KRQ)-NH₂ | | | |
| 296 | | 754 | Y-Aib-EGT-αMeF(2F)-TSD-4Pal-Aib-I-αMeL-LD-Orn-K(ϵKϵK-(γGlu)-CO- | 27 | 247 | 936 |
| | | | (CH₂)₁₆-CO₂H)AQ-Aib-EFIe-αMeY-LIEGGGK(PEG₂₄-BEA-MalDap2 Fc | | | |
| | | | KRQ)-NH₂ | | | |
| 297 | | 755 | Y-Aib-EGT-αMeF(2F)-TSD-4Pal-Aib-I-αMeL-LD-Orn-K(ϵKϵK-(γGlu)-CO- | 51 | 248 | 936 |
| | | | (CH₂)₁₆-CO₂H)AQ-Aib-EFIE-αMeY-LIEGG-Orn-SSGAPPPSK(PEG₂₄-BEA- | | | |
| | | | MalDap₂ Fc KRQ)-NH₂ | | | |
| 298 | | 756 | Y-Aib-EGT-αMeF(2F)-TSD-4Pal-Aib-I-αMeL-LD-Orn-K(2-12-(2-amino- | 51 | 249 | 936 |
| | | | ethoxy)-ethoxy]-acetyl)₂-(γGlu)-CO-(CH₂)₁₆-CO₂H)AQ-Aib-EFIE-αMeY- | | | |
| | | | LIEGG-Orn-SSGAPPPSK(PEG₂₄-BEA-MalDap₂ Fc KRQ)-NH₂ | | | |
| 299 | | 757 | Y-Aib-EGT-αMeF(2F)-TSD-4Pal-Aib-I-αMeL-LD-Orn-K(ϵKϵK-(γGlu)-CO- | 52 | 250 | 936 |
| | | | (CH₂)₁₆-CO₂H)AQ-Aib-EFIE-αMeY-LIEGG-Orn-K(PEG₂₄-BEA-MalDap₂ Fc | | | |
| | | | KRQ)-NH₂ | | | |
| 300 | | 758 | Y-Aib-EGT-αMeF(2F)-TSD-4Pal-Aib-I-αMeL-LD-Orn-K(2-12-(2-amino- | 52 | 251 | 936 |
| | | | ethoxy)-ethoxy]-acetyl)₂-(γGlu)-CO-(CH₂)₁₆-CO₂H)AQ-Aib-EFIE-αMeY- | | | |
| | | | LIEGG-Orn-K(PEG₂₄-BEA-MalDap₂ Fc KRQ)-NH₂ | | | |
| 301 | | 759 | Y-Aib-EGT-αMeF(2F)-TSD-4Pal-Aib-I-αMeL-LD-Orn-K(ϵKϵK-(γGlu)-CO- | 53 | 252 | 936 |
| | | | (CH₂)₁₆-CO₂H)AQ-Aib-Orn-FIE-αMeY-LIEGSPSSGAPPPSK(PEG₂₄-BEA- | | | |
| | | | MalDap₂ Fc KRQ)-NH₂ | | | |
| 302 | | 760 | Y-Aib-EGT-αMeF(2F)-TSD-4Pal-Aib-I-αMeL-LD-Orn-K(2-[2-(2-amino- | 53 | 253 | 936 |
| | | | ethoxy)-ethoxy]-acetyl)₂-(γGlu)-CO-(CH₂)₁₆-CO₂H)AQ-Aib-Orn-FIE-αMeY- | | | |
| | | | LIEGSPSSGAPPPSK(PEG₂₄-BEA-MalDap₂ Fc KRQ)-NH₂ | | | |
| 303 | | 761 | Y-Aib-EGT-αMeF(2F)-TSD-4Pal-Aib-I-αMeL-LD-Orn-K(2-[2-(2-amino- | 54 | 254 | 936 |
| | | | ethoxy)-ethoxy]-acetyl)₂-(γGlu)-CO-(CH₂)₁₆-CO₂H)AQ-Aib-EFIQ-αMeY- | | | |
| | | | LIEGSPSSGAPPPSK(PEG₂₄-BEA-MalDap2 Fc KRQ)-NH₂ | | | |
| 304 | | 762 | Y-Aib-EGT-αMeF(2F)-TSD-4Pal-Aib-I-αMeL-LD-Orn-K(ϵKϵK-(γGlu)-CO- | 54 | 255 | 936 |
| | | | (CH₂)₁₆-CO₂H)AQ-Aib-EFIQ-αMeY-LIEGSPSSGAPPPSK(PEG₂₄-BEA- | | | |
| | | | MalDap₂ Fc KRQ)-NH₂ | | | |
| 305 | | 763 | Y-Aib-EGT-αMeF(2F)-TSD-4Pal-Aib-I-αMeL-LD-Orn-K(2-[2-(2-amino- | 47 | 240 | 936 |
| | | | ethoxy)-ethoxy]-acetyl)₂-(γGlu)-CO-(CH₂)₁₆-CO₂H)AQ-Aib-EFIE-αMeY- | | | |
| | | | LIEGSPSSGAPPPSK(2-[2-(2-amino-ethoxy)-ethoxy]-acetyl)₆- | | | |
| | | | GPAPAPAPAPAPA-BEA-MalDap₂-Fc KRQ)-NH₂ | | | |
| 306 | | 764 | Y-Aib-EGT-αMeF(2F)-TSD-4Pal-SI-αMeL-LD-Orn-K(2-[2-(2-amino- | 55 | 256 | 936 |
| | | | ethoxy)-ethoxy]-acetyl)₂-(γGlu)-CO-(CH₂)₁₆-CO₂H)AQ-Aib-EFIE-αMeY- | | | |
| | | | LIEGSPSSGAPPPSK(2-[2-(2-amino-ethoxy)-ethoxy]-acetyl)₆- | | | |
| | | | GPAPAPAPAPAPA-BEA-MalDap₂-Fc KRQ)-NH₂ | | | |
| 307 | | 765 | Y-Aib-EGT-αMeF(2F)-TSD-4Pal-SI-αMeL-LD-Orn-K(ϵKϵK-(γGlu)-CO- | 55 | 257 | 936 |
| | | | (CH₂)₁₆-CO₂H)AQ-Aib-EFIE-αMeY-LIEGSPSSGAPPPSK(2-[2-(2-amino- | | | |
| | | | ethoxy)-ethoxy]-acetyl)₆-GPAPAPAPAPAPA-BEA-MalDap₂ Fc KRQ)-NH₂ | | | |
| 308 | | 766 | Y-Aib-EGT-αMeF(2F)-TSD-4Pal-SI-αMeL-LD-Orn-K(ϵKϵK-(γGlu)-CO- | 2 | 258 | 936 |
| | | | (CH₂)₁₆-CO₂H)AQ-Aib-EFIe-αMeY-LIEGSPSSGAPPPSK(2-[2-(2-amino- | | | |
| | | | ethoxy)-ethoxy]-acetyl)₆-GPAPAPAPAPAPA-BEA-MalDap₂-Fc KRQ)-NH₂ | | | |
| 309 | | 767 | Y-Aib-EGT-αMeF(2F)-TSD-4Pal-Aib-I-αMeL-LD-Orn-K(2-[2-(2-amino- | 47 | 240 | 936 |
| | | | ethoxy)-ethoxy]-acetyl)₂-(γGlu)-CO-(CH₂)₁₆-CO₂H)AQ-Aib-EFIE-αMeY- | | | |
| | | | LIEGSPSSGAPPPSK(2-[2-(2-amino-ethoxy)-ethoxy]-acetyl)₆-BEA- | | | |
| | | | MalDap₂-Fc KRQ)-NH₂ | | | |
| 310 | | 768 | Y-Aib-EGT-αMeF(2F)-TSD-4Pal-SI-αMeL-LD-Orn-K(ϵKϵK-(γGlu)-CO- | 2 | 258 | 941 |
| | | | (CH₂)₁₆-CO2H)AQ-Aib-EFIe-αMeY-LIEGSPSSGAPPPSK(PEG₂₄-BEA- | | | |
| | | | MalDap₂-Fc IG KRQ)-NH₂ | | | |
| 311 | | 769 | Y-Aib-EGT-αMeF(2F)-TSD-4Pal-SI-αMeL-LE-Orn-K(2-[2-(2-amino- | 23 | 210 | 94 |
| | | | ethoxy)-ethoxy]-acetyl)₂-(γGlu)-CO-(CH₂)₁₆-CO₂H)AQ-Aib-EFIE-αMeY- | | | |
| | | | LIEGGGGGGGSGGGGSGAPAPAPAPAPAPK(BEA-MalDap₂-Fc IG | | | |
| | | | KRQ)-NH₂ | | | |
| 312 | | 770 | Y-Aib-EGT-αMeF(2F)-TSD-4Pal-Aib-I-αMeL-LD-Orn-K(2-[2-(2-amino- | 54 | 254 | 941 |
| | | | ethoxy)-ethoxy]-acetyl)₂-(γGlu)-CO-(CH₂)₁₆-CO₂H)AQ-Aib-EFIQ-αMeY- | | | |
| | | | LIEGSPSSGAPPPSK(PEG₂₄-BEA-MalDap₂ Fc IG KRQ)-NH₂ | | | |
| 313 | | 771 | Y-Aib-EGT-αMeF(2F)-TSD-4Pal-Aib-I-αMeL-LD-Orn-K(ϵKϵK-(γGlu)-CO- | 54 | 255 | 941 |
| | | | (CH₂)₁₆-CO₂H)AQ-Aib-EFIQ-αMeY-LIEGSPSSGAPPPSK(PEG₂₄-BEA- | | | |
| | | | MalDap₂ Fc IG KRQ)-NH₂ | | | |
| 314 | | 772 | Y-Aib-EGT-αMeF(2F)-TSD-4Pal-Aib-I-αMeL-LD-Orn-K(2-[2-(2-amino- | 47 | 240 | 941 |
| | | | ethoxy)-ethoxy]-acetyl)₂-(γGlu)-CO-(CH₂)₁₆-CO₂H)AQ-Aib-EFIE-αMeY- | | | |
| | | | LIEGSPSSGAPPPSK(2-[2-(2-amino-ethoxy)-ethoxy]-acetyl)₆-BEA- | | | |
| | | | MalDap₂-Fc IG KRQ)-NH₂ | | | |
| 315 | | 773 | Y-Aib-EGT-αMeF(2F)-TSD-4Pal-SI-αMeL-LD-Orn-K(2-[2-(2-amino- | 58 | 262 | 941 |
| | | | ethoxy)-ethoxy]-acetyl)₂-(γGlu)-CO-(CH₂)₁₆-CO₂H)AQ-Aib-EFIQ-αMeY- | | | |
| | | | LIEGSPSSGAPPPSK(PEG₂₄-BEA-MalDap₂-Fc IG KRQ)-NH₂ | | | |
| 316 | | 774 | Y-Aib-EGT-αMeF(2F)-TSDY-Aib-I-αMeL-LD-Orn-K(2-[2-(2-amino- | 61 | 330 | 941 |
| | | | ethoxy)-ethoxy]-acetyl)₂-(γGlu)-CO-(CH₂)₁₆-CO₂H)AQ-Aib-EFIe-αMeY- | | | |
| | | | LIEGSPSSGAPPPSK(PEG₂₄-BEA-MalDap₂-Fc IG KRQ)-NH₂ | | | |
| 317 | | 775 | Y-Aib-EGT-αMeF(2F)-TSDY-Aib-I-αMeL-LD-Orn-K(2-[2-(2-amino- | 59 | 264 | 941 |
| | | | ethoxy)-ethoxy]-acetyl)₂-(γGlu)-CO-(CH₂)₁₆-CO₂H)AQ-Aib-EFIE-αMeY- | | | |
| | | | LIEGSPSSGAPPPSK(PEG₂₄-BEA-MalDap₂-Fc IG KRQ)-NH₂ | | | |
| 318 | | 776 | Y-Aib-EGT-αMeF(2F)-TSD-4Pal-Aib-I-αMeL-LD-Orn-K(2-[2-(2-amino- | 92 | 331 | 941 |
| | | | ethoxy)-ethoxy]-acetyl)₂-(γGlu)-CO-(CH₂)₁₆-CO₂H)AQ-Aib-EFIQ-αMeY- | | | |
| | | | LIE-Aib-SPSSGAPPPSK(PEG₂₄-BEA-MalDap₂-Fc IG KRQ)-NH₂ | | | |
| 319 | | 777 | Y-Aib-EGT-αMeF(2F)-TSD-4Pal-Aib-I-αMeL-LD-Orn-K(ϵKϵK-(γGlu)-CO- | 92 | 332 | 941 |
| | | | (CH₂)₁₆-CO₂H)AQ-Aib-EFIQ-αMeY-LIE-Aib-SPSSGAPPPSK(PEG₂₄-BEA- | | | |
| | | | MalDap₂-Fc IG KRQ)-NH₂ | | | |
| 320 | | 778 | Y-Aib-EGT-αMeF(2F)-TSD-4Pal-SI-αMeL-LD-Orn-K(2-[2-(2-amino- | 58 | 262 | 941 |
| | | | ethoxy)-ethoxy]-acetyl)₂-(γGlu)-CO-(CH₂)₁₆-CO₂H)AQ-Aib-EFIQ-αMeY- | | | |
| | | | LIEGSPSSGAPPPSK(2-[2-(2-amino-ethoxy)-ethoxy]-acetyl)₆- | | | |
| | | | GPAPAPAPAPAPA-BEA-MalDap₂-Fc IG KRQ)-NH₂ | | | |
| 321 | | 779 | Y-Aib-EGT-αMeF(2F)-TSD-4Pal-SI-αMeL-LD-Orn-K(ϵKϵK-(γGlu)-CO- | 58 | 263 | 941 |
| | | | (CH₂)₁₆-CO₂H)AQ-Aib-EFIQ-αMeY-LIEGSPSSGAPPPSK(2-12-(2-amino- | | | |
| | | | ethoxy)-ethoxy]-acetyl)₆-GPAPAPAPAPAPA-BEA-MalDap₂-Fc IG KRQ)- | | | |
| | | | NH₂ | | | |
| 322 | | 780 | Y-Aib-EGT-αMeF(2F)-TSD-4Pal-SI-αMeL-LD-Orn-K(2-[2-(2-amino- | 58 | 262 | 941 |
| | | | ethoxy)-ethoxy]-acetyl)₂-(γGlu)-CO-(CH₂)₁₆-CO₂H)AQ-Aib-EFIQ-αMeY- | | | |
| | | | LIEGSPSSGAPPPSK(PEG₂₄-BEA-MalDap₂-Fc IG KRQ)-NH₂ | | | |
| 323 | | 781 | Y-Aib-EGT-αMeF(2F)-TSD-4Pal-SI-αMeL-LD-Orn-K(ϵKϵK-(γGlu)-CO- | 58 | 263 | 941 |
| | | | (CH₂)₁₆-CO₂H)AQ-Aib-EFIQ-αMeY-LIEGSPSSGAPPPSK(PEG₂₄-BEA- | | | |
| | | | MalDap₂-Fc IG KRQ)-NH₂ | | | |
| 324 | | 782 | Y-Aib-EGT-αMeF(2F)-TSD-4Pal-SI-αMeL-LD-Orn-K(2-[2-(2-amino- | 58 | 262 | 941 |
| | | | ethoxy)-ethoxy]-acetyl)₂-(γGlu)-CO-(CH₂)₁₆-CO₂H)AQ-Aib-EFIQ-αMeY- | | | |
| | | | LIEGSPSSGAPPPSK(2-[2-(2-amino-ethoxy)-ethoxy]-acetyl)₆-BEA- | | | |
| | | | MalDap₂-Fc IG KRQ)-NH₂ | | | |
| 325 | | 783 | Y-Aib-EGT-αMeF(2F)-TSD-4Pal-SI-αMeL-LD-Orn-K(ϵKϵK-(γGlu)-CO- | 58 | 263 | 941 |
| | | | (CH₂)₁₆-CO₂H)AQ-Aib-EFIQ-αMeY-LIEGSPSSGAPPPSK(2-[2-(2-amino- | | | |
| | | | ethoxy)-ethoxy]-acetyl)₆-BEA-MalDap₂-Fc IG KRQ)-NH₂ | | | |
| 326 | | 784 | Y-Aib-EGT-αMeF(2F)-TSD-4Pal-SI-αMeL-LD-Orn-K(ϵKϵK-(γGlu)-CO- | 2 | 258 | 935 |
| | | | (CH₂)₁₆-CO₂H)AQ-Aib-EFIe-αMeY-LIEGSPSSGAPPPS-K(PEG₂₄-BEA- | | | |
| | | | MalDap₂-Fc N-Cys)-NH₂ | | | |
| 327 | | 785 | Y-Aib-EGT-αMeF(2F)-TSD-4Pal-SI-αMeL-LD-Orn-K(ϵKϵK-(γGlu)-CO- | 2 | 258 | 942 |
| | | | (CH₂)₁₆-CO₂H)AQ-Aib-EFIe-αMeY-LIEGSPSSGAPPPS-K(PEG₂₄-BEA- | | | |
| | | | MalDap₂-Fc N-Cys KRQ)-NH₂ | | | |
| 328 | | 786 | Y-Aib-EGT-αMeF(2F)-TSD-4Pal-Aib-I-αMeL-LD-Orn-K(2-[2-(2-amino- | 27 | 214 | 936 |
| | | | ethoxy)-ethoxy]-acetyl)₂-(γGlu)-CO-(CH₂)₁₆-CO₂H)AQ-Aib-EFIe-αMeY- | | | |
| | | | LIEGGGGGGGSGGGGSGAPAPAPAPAPAPK(BEA-MalDap2-Fc KRQ)- | | | |
| | | | NH₂ | | | |
| 329 | | 787 | Y-Aib-EGT-αMeF(2F)-TSD-4Pal-SI-αMeL-LD-Orn-K(ϵKϵK-(γGlu)-CO- | 2 | 258 | 936 |
| | | | (CH₂)₁₆-CO₂H)AQ-Aib-EFIe-αMeY-LIEGSPSSGAPPPS-K(PEG₂₄-BEA- | | | |
| | | | MalDap₂-Fc KRQ)-NH₂ | | | |
| 330 | | 788 | Y-Aib-QGT-αMeF(2F)-TSD-4Pal-SI-αMeL-LD-Orn-K(2-[2-(2-amino- | 93 | 333 | 935 |
| | | | ethoxy)-ethoxy]-acetyl)₂-(γGlu)-CO-(CH₂)₁₆-CO₂H)AQ-αMe4Pal-Orn-FIe- | | | |
| | | | αMeY-LIEGSPSSGAPPPSK(PEG₂₄-BEA-MalDap₂-Fc)-NH₂ | | | |
| 331 | | 789 | Y-Aib-QGT-αMeF(2F)-TSD-4Pal-SI-αMeL-LD-Orn-K(2-[2-(2-amino- | 94 | 334 | 935 |
| | | | ethoxy)-ethoxy]-acetyl)₂-(γGlu)-CO-(CH₂)₁₆-CO₂H)AQ-αMe4Pal-Orn-FIE- | | | |
| | | | αMeY-LIEGSPSSGAPPPSK(PEG₂₄-BEA-MalDap₂-Fc)-NH₂ | | | |
| 332 | | 790 | Y-Aib-QGT-αMeF(2F)-TSD-4Pal-αMeS-I-αMeL-LD-Orn-K(2-[2-(2-amino- | 95 | 335 | 935 |
| | | | ethoxy)-ethoxy]-acetyl)₂-(γGlu)-CO-(CH₂)₁₆-CO₂H)AQ-αMe4Pal-Orn-FIe- | | | |
| | | | αMeY-LIEGSPSSGAPPPSK(PEG₂₄-BEA-MalDap₂-Fc)-NH₂ | | | |
| 333 | | 791 | Y-Aib-QGT-αMeF(2F)-TSD-4Pal-αMeS-I-αMeL-LD-Orn-K(2-12-(2-amino- | 96 | 336 | 935 |
| | | | ethoxy)-ethoxy]-acetyl)₂-(γGlu)-CO-(CH₂)₁₆-CO₂H)AQ-αMe4Pal-Orn-FIE- | | | |
| | | | αMeY-LIEGSPSSGAPPPSK(PEG₂₄-BEA-MalDap₂-Fc)-NH₂ | | | |
| 336 | 25 | 792 | Y-Aib-QGT-αMeF(2F)-TSDY-αMeS-I-αMeL-LD-Orn-K(2-12-(2-amino- | 97 | 337 | 935 |
| | | | ethoxy)-ethoxy]-acetyl)₂-(γGlu)-CO-(CH₂)₁₆-CO₂H)AQ-αMe4Pal-Orn-FIe- | | | |
| | | | αMeY-LIEGSPSSGAPPPSK(PEG₂₄-BEA-MalDap₂-Fc)-NH₂ | | | |
| 337 | | 793 | Y-Aib-QGT-αMeF(2F)-TSDY-αMeS-I-αMeL-LD-Orn-K(2-[2-(2-amino- | 98 | 338 | 935 |
| | | | ethoxy)-ethoxy]-acetyl)₂-(γGlu)-CO-(CH₂)₁₆-CO₂H)AQ-αMe4Pal-Orn-FIE- | | | |
| | | | αMeY-LIEGSPSSGAPPPSK(PEG₂₄-BEA-MalDap₂-Fc)-NH₂ | | | |
| 338 | | 794 | Y-Aib-QGT-αMeF(2F)-TSD-4Pal-αMeS-I-αMeL-LD-Orn-K(2-[2-(2-amino- | 99 | 339 | 935 |
| | | | ethoxy)-ethoxy]-acetyl)₂-(γGlu)-CO-(CH₂)₁₆-CO₂H)AQ-αMe4Pal-Orn-FIE- | | | |
| | | | αMeY-LIEGGGGGGGSGGGGSGAPAPAPAPAPAPK(BEA-MalDap₂-Fc)- | | | |
| | | | NH₂ | | | |
| 339 | | 795 | Y-Aib-QGT-αMeF(2F)-TSDY-αMeS-I-αMeL-LD-Orn-K(2-[2-(2-amino- | 100 | 340 | 935 |
| | | | ethoxy)-ethoxy]-acetyl)₂-(γGlu)-CO-(CH₂)₁₆-CO₂H)AQ-αMe4Pal-Orn-FIe- | | | |
| | | | αMeY-LIEGGGGGGGSGGGGSGAPAPAPAPAPAPK(BEA-MalDap₂-Fc)- | | | |
| | | | NH₂ | | | |
| 340 | | 796 | Y-Aib-QGT-αMeF(2F)-TSD-4Pal-αMeS-I-αMeL-LD-Orn-K(2-[2-(2-amino- | 101 | 341 | 935 |
| | | | ethoxy)-ethoxy]-acetyl)₂-(γGlu)-CO-(CH₂)₁₆-CO₂H)AQ-αMe4Pal-Orn-FIE- | | | |
| | | | αMeY-LIEGGPSSGAPPPSGK(PEG₂₄-BEA-MalDap₂-Fc)-NH₂ | | | |
| 341 | | 797 | Y-Aib-QGT-αMeF(2F)-TSDY-αMeS-I-αMeL-LD-Orn-K(2-[2-(2-amino- | 102 | 342 | 935 |
| | | | ethoxy)-ethoxy]-acetyl)₂-(γGlu)-CO-(CH₂)₁₆-CO₂H)AQ-αMe4Pal-Orn-FIe- | | | |
| | | | αMeY-LIEGGPSSGAPPPSGK(PEG₂₄-BEA-MalDap₂-Fc)-NH2 | | | |
| 342 | | 798 | Y-Aib-QGT-αMeF(2F)-TSD-4Pal-αMeS-I-αMeL-LD-Orn-K(ϵKϵK-(γGlu)- | 101 | 343 | 935 |
| | | | CO-(CH₂)₁₆-CO₂H)AQ-αMe4Pal-Orn-FIE-αMeY- | | | |
| | | | LIEGGPSSGAPPPSGK(PEG₂₄-BEA-MalDap₂-Fc)-NH₂ | | | |
| 343 | | 799 | Y-Aib-QGT-αMeF(2F)-TSDY-αMeS-I-αMeL-LD-Orn-K(&K&K-(γGlu)-CO- | 102 | 344 | 935 |
| | | | (CH₂)₁₆-CO₂H)AQ-αMe4Pal-Orn-FIe-αMeY-LIEGGPSSGAPPPSGK(PEG₂₄- | | | |
| | | | BEA-MalDap₂-Fc)-NH₂ | | | |
| 344 | | 800 | Y-Aib-QGT-αMeF(2F)-TSD-4Pal-αMeS-I-αMeL-LD-Orn-K(2-[2-(2-amino- | 103 | 345 | 935 |
| | | | ethoxy)-ethoxy]-acetyl)₂-(γGlu)-CO-(CH₂)₁₆-CO₂H)AQ-αMe4Pal-Orn- | | | |
| | | | FIK(PEG₂₄-BEA-MalDap₂-Fc)-αMeY-LIEGGPSSGAPPPSGG-NH₂ | | | |
| 345 | | 801 | Y-Aib-QGT-αMeF(2F)-TSDY-αMeS-I-αMeL-LD-Orn-K(2-[2-(2-amino- | 104 | 346 | 935 |
| | | | ethoxy)-ethoxy]-acetyl)₂-(γGlu)-CO-(CH₂)₁₆-CO₂H)AQ-αMe4Pal-Orn- | | | |
| | | | FIK(PEG₂₄-BEA-MalDap₂-Fc)-αMeY-LIEGGPSSGAPPPSGG-NH₂ | | | |
| 346 | | 802 | Y-Aib-QGT-αMeF(2F)-TSD-4Pal-αMeS-I-αMeL-LD-Orn-K(ϵKϵK-(γGlu)- | 103 | 347 | 935 |
| | | | CO-(CH₂)₁₆-CO₂H)AQ-αMe4Pal-Orn-FIK(PEG₂₄-BEA-MalDap₂-Fc)-αMeY- | | | |
| | | | LIEGGPSSGAPPPSGG-NH₂ | | | |
| 347 | | 803 | Y-Aib-QGT-αMeF(2F)-TSDY-αMeS-I-αMeL-LD-Orn-K(ϵKϵK-(γGlu)-CO- | 105 | 348 | 935 |
| | | | (CH₂)₁₆-CO₂H)AQ-αMe4Pal-Orn-FIK(PEG₂₄-BEA-MalDap₂-Fc)-αMeY- | | | |
| | | | LIEGGPSSGAPPPSGG-NH₂ | | | |
| 348 | | 804 | Y-Aib-QGT-αMeF(2F)-TSD-4Pal-αMeS-I-αMeL-LD-Orn-K(2-[2-(2-amino- | 106 | 349 | 935 |
| | | | ethoxy)-ethoxy]-acetyl)₂-(γGlu)-CO-(CH₂)₁₆-CO2H)AQ-αMe4Pal-Orn-FIE- | | | |
| | | | αMeY-LIEGGPSSGK(PEG₂₄-BEA-MalDap₂-Fc)-NH₂ | | | |
| 349 | | 805 | Y-Aib-QGT-αMeF(2F)-TSDY-αMeS-I-αMeL-LD-Orn-K(2-[2-(2-amino- | 107 | 350 | 935 |
| | | | ethoxy)-ethoxy]-acetyl)₂-(γGlu)-CO-(CH₂)₁₆-CO₂H)AQ-αMe4Pal-Orn-FIe- | | | |
| | | | αMeY-LIEGGPSSGK(PEG₂₄-BEA-MalDap₂-Fc)-NH₂ | | | |
| 350 | | 806 | Y-Aib-QGT-αMeF(2F)-TSD-4Pal-αMeS-I-αMeL-LD-Orn-K(ϵKϵK-(γGlu)- | 106 | 351 | 935 |
| | | | CO-(CH₂)₁₆-CO₂H)AQ-αMe4Pal-Orn-FIE-αMeY-LIEGGPSSGK(PEG₂₄- | | | |
| | | | BEA-MalDap₂-Fc)-NH₂ | | | |
| 351 | | 807 | Y-Aib-QGT-αMeF(2F)-TSDY-αMeS-I-αMeL-LD-Orn-KAQ-αMe4Pal-Orn- | 107 | 352 | 935 |
| | | | FIe-αMeY-LIEGGPSSGK(PEG₂₄-BEA-MalDap₂-Fc)-NH₂ | | | |
| 352 | | 808 | Y-Aib-QGT-αMeF(2F)-TSD-4Pal-αMeS-I-αMeL-LD-Orn-K(2-[2-(2-amino- | 99 | 339 | 935 |
| | | | ethoxy)-ethoxy]-acetyl)₂-(γGlu)-CO-(CH₂)₁₆-CO₂H)AQ-αMe4Pal-Orn-FIE- | | | |
| | | | αMeY-LIEGGGK(PEG₂₄-BEA-MalDap2-Fc)-NH₂ | | | |
| 353 | | 809 | Y-Aib-QGT-αMeF(2F)-TSDY-αMeS-I-αMeL-LD-Orn-K(2-[2-(2-amino- | 100 | 340 | 935 |
| | | | ethoxy)-ethoxy]-acetyl)₂-(γGlu)-CO-(CH₂)₁₆-CO₂H)AQ-αMe4Pal-Orn-FIe- | | | |
| | | | αMeY-LIEGGGK(PEG₂₄-BEA-MalDap₂-Fc)-NH₂ | | | |
| 354 | | 810 | Y-Aib-QGT-αMeF(2F)-TSD-4Pal-αMeS-I-αMeL-LD-Orn-K(ϵKϵK-(γGlu)- | 99 | 353 | 935 |
| | | | CO-(CH₂)₁₆-CO₂H)AQ-αMe4Pal-Orn-FIE-αMeY-LIEGGGK(PEG₂₄-BEA- | | | |
| | | | MalDap₂-Fc)-NH₂ | | | |
| 355 | | 811 | Y-Aib-QGT-αMeF(2F)-TSDY-αMeS-I-αMeL-LD-Orn-K(ϵKϵK-(γGlu)-CO- | 100 | 354 | 935 |
| | | | (CH₂)₁₆-CO₂H)AQ-αMe4Pal-Orn-FIe-αMeY-LIEGGGK(PEG₂₄-BEA- | | | |
| | | | MalDap₂-Fc)-NH₂ | | | |
| 356 | | 812 | Y-Aib-QGT-αMeF(2F)-TSD-4Pal-αMeS-I-αMeL-LD-Orn-K(2-12-(2-amino- | 99 | 339 | 935 |
| | | | ethoxy)-ethoxy]-acetyl)₂-(γGlu)-CO-(CH₂)₁₆-CO₂H)AQ-αMe4Pal-Orn-FIE- | | | |
| | | | αMeY-LIEGGGGGGGQGGGGQGGGGQK(BEA-MalDap₂-Fc)-NH₂ | | | |
| 357 | | 813 | Y-Aib-QGT-αMeF(2F)-TSDY-αMeS-I-αMeL-LD-Orn-K(2-[2-(2-amino- | 100 | 340 | 935 |
| | | | ethoxy)-ethoxy]-acetyl)₂-(γGlu)-CO-(CH₂)₁₆-CO₂H)AQ-αMe4Pal-Orn-FIe- | | | |
| | | | αMeY-LIEGGGGGGGQGGGGQGGGGQK(BEA-MalDap₂-Fc)-NH₂ | | | |
| 358 | | 814 | Y-Aib-QGT-αMeF(2F)-TSD-4Pal-αMeS-I-αMeL-LD-Orn-K(ϵKϵK-(γGlu)- | 96 | 355 | 935 |
| | | | CO-(CH₂)₁₆-CO2H)AQ-αMe4Pal-Orn-FIE-αMeY- | | | |
| | | | LIEGSPSSGAPPPSK(PEG₂₄-BEA-MalDap₂ Fc)-NH₂ | | | |
| 359 | | 815 | Y-Aib-QGT-αMeF(2F)-TSDY-αMeS-I-αMeL-LD-Orn-K(ϵKϵK-(γGlu)-CO- | 97 | 356 | 935 |
| | | | (CH₂)₁₆-CO₂H)AQ-αMe4Pal-Orn-FIe-αMeY-LIEGSPSSGAPPPSK(PEG₂₄- | | | |
| | | | BEA-MalDap₂ Fc)-NH₂ | | | |
| 360 | | 816 | Y-Aib-QGT-αMeF(2F)-TSD-4Pal-αMeS-I-αMeL-LD-Orn-K(2-12-(2-amino- | 108 | 357 | 935 |
| | | | ethoxy)-ethoxy]-acetyl)₂-(γGlu)-CO-(CH₂)₁₆-CO₂H)AQ-αMe4Pal-Orn-FIe- | | | |
| | | | αMeY-LIEGSPSSGK(PEG₂₄-BEA-MalDap₂ Fc)-NH₂ | | | |
| 361 | | 817 | Y-Aib-QGT-αMeF(2F)-TSD-4Pal-αMeS-I-αMeL-LD-Orn-K(2-12-(2-amino- | 109 | 358 | 935 |
| | | | ethoxy)-ethoxy]-acetyl)₂-(γGlu)-CO-(CH₂)₁₆-CO₂H)AQ-αMe4Pal-Orn-FIe- | | | |
| | | | αMeY-LIEGGGGGGGSGGGGSGGGGSK(BEA-MalDap₂ Fc)-NH₂ | | | |
| 362 | | 818 | Y-Aib-QGT-αMeF(2F)-TSD-4Pal-αMeS-I-αMeL-LD-Orn-K(2-[2-(2-amino- | 109 | 358 | 935 |
| | | | ethoxy)-ethoxy]-acetyl)₂-(γGlu)-CO-(CH₂)₁₆-CO₂H)AQ-αMe4Pal-Orn-FIe- | | | |
| | | | αMeY-LIEGGGGGGGSGGGGSGAPAPAPAPAPAPK(BEA-MalDap₂ Fc)- | | | |
| | | | NH₂ | | | |
| 363 | | 819 | Y-Aib-QGT-αMeF(2F)-TSD-4Pal-αMeS-I-αMeL-LD-Orn-K(2-[2-(2-amino- | 109 | 358 | 935 |
| | | | ethoxy)-ethoxy]-acetyl)₂-(γGlu)-CO-(CH₂)₁₆-CO₂H)AQ-αMe4Pal-Orn-FIe- | | | |
| | | | αMeY-LIEGGGK(PEG₂₄-BEA-MalDap₂-Fc)-NH₂ | | | |
| 364 | | 820 | Y-Aib-QGT-αMeF(2F)-TSD-4Pal-αMeS-I-αMeL-LD-Orn-K(ϵKϵK-(γGlu)- | 95 | 359 | 935 |
| | | | CO-(CH₂)₁₆-CO₂H)AQ-αMe4Pal-Orn-FIe-αMeY- | | | |
| | | | LIEGSPSSGAPPPSK(PEG₂₄-BEA-MalDap₂-Fc)-NH₂ | | | |
| 365 | | 821 | Y-Aib-QGT-αMeF(2F)-TSD-4Pal-αMeS-I-αMeL-LD-Orn-K(2-12-(2-amino- | 110 | 360 | 935 |
| | | | ethoxy)-ethoxy]-acetyl)₂-(γGlu)-CO-(CH₂)₁₆-CO₂H)AQ-αMe4Pal-Orn-FIQ- | | | |
| | | | αMeY-LIEGSPSSGAPPPSK(PEG₂₄-BEA-MalDap₂-Fc)-NH₂ | | | |
| 366 | | 822 | Y-Aib-QGT-αMeF(2F)-TSD-4Pal-αMeS-I-αMeL-LD-Orn-K(ϵKϵK-(γGlu)- | 110 | 361 | 935 |
| | | | CO-(CH₂)₁₆-CO₂H)AQ-αMe4Pal-Orn-FIQ-αMeY- | | | |
| | | | LIEGSPSSGAPPPSK(PEG₂₄-BEA-MalDap₂-Fc)-NH₂ | | | |
| 367 | | 823 | Y-Aib-QGT-αMeF(2F)-TSDY-αMeS-I-αMeL-LD-Orn-K(2-12-(2-amino- | 111 | 362 | 935 |
| | | | ethoxy)-ethoxy]-acetyl)₂-(γGlu)-CO-(CH₂)₁₆-CO₂H)AQ-αMe4Pal-Orn-FIQ- | | | |
| | | | αMeY-LIEGSPSSGAPPPSK(PEG₂₄-BEA-MalDap₂-Fc)-NH₂ | | | |
| 368 | | 824 | Y-Aib-QGT-αMeF(2F)-TSDY-αMeS-I-αMeL-LD-Orn-K(ϵKϵK-(γGlu)-CO- | 111 | 363 | 935 |
| | | | (CH₂)₁₆-CO₂H)AQ-αMe4Pal-Orn-FIQ-αMeY-LIEGSPSSGAPPPSK(PEG₂₄- | | | |
| | | | BEA-MalDap₂-Fc)-NH₂ | | | |
| 369 | | 825 | Y-Aib-QGT-αMeF(2F)-TSDY-αMeS-I-αMeL-LD-Orn-K(2-[2-(2-amino- | 97 | 337 | 935 |
| | | | ethoxy)-ethoxy]-acetyl)₂-(γGlu)-CO-(CH₂)₁₆-CO₂H)AQ-αMe4Pal-Orn-FIe- | | | |
| | | | αMeY-LIEGSPSSGAPPPSK(2-[2-(2-amino-ethoxy)-ethoxy]-acetyl)₆- | | | |
| | | | GPAPAPAPAPAPA-BEA(MalDap₂-Fc)-NH₂ | | | |
| 370 | | 826 | Y-Aib-QGT-αMeF(2F)-TSDY-αMeS-I-αMeL-LD-Orn-K(2-[2-(2-amino- | 112 | 364 | 935 |
| | | | ethoxy)-ethoxy]-acetyl)₂-(γGlu)-CO-(CH₂)₁₆-CO₂H)AQ-αMe4Pal-Orn-FIe- | | | |
| | | | αMeY-LIE-Aib-SPSSGAPPPSK(PEG₂₄-BEA-MalDap₂-Fc)-NH₂ | | | |
| 371 | | 827 | Y-Aib-QGT-αMeF(2F)-TSDY-αMeS-I-αMeL-LD-Orn-K(2-[2-(2-amino- | 113 | 365 | 935 |
| | | | ethoxy)-ethoxy]-acetyl)₂-(γGlu)-CO-(CH₂)₁₆-CO₂H)AQ-αMe4Pal-EFIe- | | | |
| | | | αMeY-LIEGSPSSGAPPPSK(PEG₂₄-BEA-MalDap₂-Fc)-NH₂ | | | |
| 372 | | 828 | Y-Aib-QGT-αMeF(2F)-TSDY-αMeS-I-αMeL-LD-Orn-K(2-[2-(2-amino- | 114 | 366 | 935 |
| | | | ethoxy)-ethoxy]-acetyl)₂-(γGlu)-CO-(CH₂)₁₆-CO₂H)AQ-αMe4Pal-EFIQ- | | | |
| | | | αMeY-LIEGSPSSGAPPPSK(PEG₂₄-BEA-MalDap₂-Fc)-NH₂ | | | |
| 373 | | 829 | Y-Aib-QGT-αMeF(2F)-TSDY-αMeS-I-αMeL-LD-Orn-K(2-[2-(2-amino- | 115 | 367 | 935 |
| | | | ethoxy)-ethoxy]-acetyl)₂-(γGlu)-CO-(CH₂)₁₆-CO₂H)AQ-Aib-EFIQ-αMeY- | | | |
| | | | LIEGSPSSGAPPPSK(PEG₂₄-BEA-MalDap₂-Fc)-NH₂ | | | |
| 374 | | 830 | Y-Aib-QGT-αMeF(2F)-TSDY-αMeS-I-αMeL-LD-Orn-K(2-[2-(2-amino- | 116 | 368 | 935 |
| | | | ethoxy)-ethoxy]-acetyl)₂-(γGlu)-CO-(CH₂)₁₆-CO₂H)AQ-αMe4Pal-EFIQ- | | | |
| | | | αMeY-LLEGSPSSGAPPPSK(PEG₂₄-BEA-MalDap₂-Fc)-NH₂ | | | |
| 375 | | 831 | Y-Aib-QGT-αMeF(2F)-TSDY-αMeS-I-αMeL-LD-Orn-K(2-12-(2-amino- | 100 | 340 | 935 |
| | | | ethoxy)-ethoxy]-acetyl)₂-(γGlu)-CO-(CH₂)₁₆-CO₂H)AQ-αMe4Pal-Orn-FIe- | | | |
| | | | αMeY-LIEGGGGGGGSGGGGSGGGGSK(BEA-MalDap₂-Fc)-NH₂ | | | |
| 376 | | 832 | Y-Aib-QGT-αMeF(2F)-TSD-4Pal-SI-αMeL-LD-Orn-K(2-[2-(2-amino- | 117 | 369 | 935 |
| | | | ethoxy)-ethoxy]-acetyl)₂-(γGlu)-CO-(CH₂)₁₆-CO₂H)AQ-αMe4Pal-Orn-FIQ- | | | |
| | | | αMeY-LIEGSPSSGAPPPSK(PEG₂₄-BEA-MalDap₂-Fc)-NH₂ | | | |
| 377 | | 833 | Y-Aib-QGT-αMeF(2F)-TSDY-αMeS-I-αMeL-LD-Orn-K(2-[2-(2-amino- | 118 | 370 | 935 |
| | | | ethoxy)-ethoxy]-acetyl)₂-(γGlu)-CO-(CH₂)₁₆-CO₂H)AQ-αMe4Pal-Orn-FIe- | | | |
| | | | αMeY-LIE-Aib-GGGGGGSGGGGSGGGGSK(BEA-MalDap₂-Fc)-NH₂ | | | |
| 378 | | 834 | Y-Aib-QaT-αMeF(2F)-TSDY-αMeS-I-αMeL-LD-Orn-K(2-[2-(2-amino- | 119 | 371 | 935 |
| | | | ethoxy)-ethoxy]-acetyl)₂-(γGlu)-CO-(CH₂)₁₆-CO₂H)AQ-αMe4Pal-EFIQ- | | | |
| | | | αMeY-LIEGSPSSGAPPPSK(PEG₂₄-BEA-MalDap₂-Fc)-NH₂ | | | |
| 379 | | 835 | Y-αMeS-QGT-αMeF(2F)-TSDY-αMeS-I-αMeL-LD-Orn-K(2-[2-(2-amino- | 120 | 372 | 935 |
| | | | ethoxy)-ethoxy]-acetyl)₂-(γGlu)-CO-(CH₂)₁₆-CO₂H)AQ-αMe4Pal-EFIQ- | | | |
| | | | αMeY-LIEGSPSSGAPPPSK(PEG₂₄-BEA-MalDap₂-Fc)-NH₂ | | | |
| 380 | | 836 | Y-Iva-QGT-αMeF(2F)-TSDY-αMeS-I-αMeL-LD-Orn-K(2-[2-(2-amino- | 121 | 373 | 935 |
| | | | ethoxy)-ethoxy]-acetyl)₂-(γGlu)-CO-(CH₂)₁₆-CO₂H)AQ-αMe4Pal-EFIQ- | | | |
| | | | αMeY-LIEGSPSSGAPPPSK(PEG₂₄-BEA-MalDap₂-Fc)-NH₂ | | | |
| 381 | | 837 | Y-Aib-HGT-αMeF(2F)-TSDY-αMeS-I-αMeL-LD-Orn-K(2-12-(2-amino- | 122 | 374 | 935 |
| | | | ethoxy)-ethoxy]-acetyl)₂-(γGlu)-CO-(CH₂)₁₆-CO₂H)AQ-αMe4Pal-EFIQ- | | | |
| | | | αMeY-LIEGSPSSGAPPPSK(PEG₂₄-BEA-MalDap₂-Fc)-NH2 | | | |
| 382 | | 838 | H-Aib-HGT-αMeF(2F)-TSDY-αMeS-I-αMeL-LD-Orn-K(2-[2-(2-amino- | 123 | 375 | 935 |
| | | | ethoxy)-ethoxy]-acetyl)₂-(γGlu)-CO-(CH₂)₁₆-CO₂H)AQ-αMe4Pal-EFIQ- | | | |
| | | | αMeY-LIEGSPSSGAPPPSK(PEG₂₄-BEA-MalDap₂-Fc)-NH₂ | | | |
| 383 | | 839 | H-Aib-HGT-αMeF(2F)-TSDY-αMeS-I-αMeL-LD-Orn-K(2-[2-(2-amino- | 124 | 376 | 935 |
| | | | ethoxy)-ethoxy]-acetyl)₂-(γGlu)-CO-(CH₂)₁₆-CO₂H)AQ-Aib-EFIQ-αMeY- | | | |
| | | | LIEGSPSSGAPPPSK(PEG₂₄-BEA-MalDap₂-Fc)-NH₂ | | | |
| 384 | | 840 | H-Aib-HGT-αMeF(2F)-TSD-4Pal-αMeS-I-αMeL-LD-Orn-K(2-[2-(2-amino- | 125 | 377 | 935 |
| | | | ethoxy)-ethoxy]-acetyl)₂-(γGlu)-CO-(CH₂)₁₆-CO₂H)AQ-αMe4Pal-EFIQ- | | | |
| | | | αMeY-LIEGSPSSGAPPPSK(PEG₂₄-BEA-MalDap₂-Fc)-NH₂ | | | |
| 385 | | 841 | H-Aib-HGT-αMeF(2F)-TSD-4Pal-SI-αMeL-LD-Orn-K(2-12-(2-amino- | 126 | 378 | 935 |
| | | | ethoxy)-ethoxy]-acetyl)₂-(γGlu)-CO-(CH₂)₁₆-CO₂H)AQ-αMe4Pal-EFIQ- | | | |
| | | | αMeY-LIEGSPSSGAPPPSK(PEG₂₄-BEA-MalDap₂-Fc)-NH₂ | | | |
| 386 | | 842 | Y-Aib-QGT-αMeF(2F)-TSDY-αMeS-I-αMeL-LD-Orn-K(2-[2-(2-amino- | 127 | 379 | 935 |
| | | | ethoxy)-ethoxy]-acetyl)₂-(γGlu)-CO-(CH₂)₁₆-CO₂H)AQ-αMe4Pal-EFIQ- | | | |
| | | | αMeY-LIE-Aib-SPSSGAPPPSK(PEG₂₄-BEA-MalDap₂-Fc)-NH₂ | | | |
| 387 | 26 | 843 | Y-Aib-QGT-aMcF(2F)-TSDY-αMeS-I-αMeL-LD-Orn-K(2-[2-(2-amino- | 128 | 380 | 935 |
| | | | ethoxy)-ethoxy]-acetyl)₂-(γGlu)-CO-(CH₂)₁₆-CO₂H)AQ-αMe4Pal-EFIE- | | | |
| | | | αMeY-LIEGSPSSGAPPPSK(PEG₂₄-BEA-MalDap₂-Fc)-NH₂ | | | |
| 388 | | 844 | Y-Aib-QGT-αMeF(2F)-TSD-4Pal-αMeS-I-αMeL-LD-Orn-K(2-[2-(2-amino- | 129 | 381 | 935 |
| | | | ethoxy)-ethoxy]-acetyl)₂-(γGlu)-CO-(CH₂)₁₆-CO₂H)AQ-αMe4Pal-EFIQ- | | | |
| | | | αMeY-LIEGSPSSGAPPPSK(PEG₂₄-BEA-MalDap₂-Fc)-NH₂ | | | |
| 389 | | 845 | Y-Aib-QGT-αMeF(2F)-TSD-4Pal-αMeS-I-αMeL-LD-Orn-K(2-[2-(2-amino- | 130 | 382 | 935 |
| | | | ethoxy)-ethoxy]-acetyl)₂-(γGlu)-CO-(CH₂)₁₆-CO₂H)AQ-αMe4Pal-EFIE- | | | |
| | | | αMeY-LIEGSPSSGAPPPSK(PEG₂₄-BEA-MalDap₂-Fc)-NH₂ | | | |
| 390 | | 846 | Y-Aib-QGT-αMeF(2F)-TSDY-αMeS-I-αMeL-LD-Orn-K(2-[2-(2-amino- | 114 | 383 | 935 |
| | | | ethoxy)-ethoxy]-acetyl)-(γGlu)-CO-(CH₂)₁₆-CO₂H)AQ-αMe4Pal-EFIQ- | | | |
| | | | αMeY-LIEGSPSSGAPPPSK(PEG₂₄-BEA-MalDap₂-Fc)-NH₂ | | | |
| 391 | | 847 | Y-Aib-QGT-αMeF(2F)-TSDY-αMeS-I-αMeL-LD-Orn-K(2-[2-(2-amino- | 131 | 384 | 935 |
| | | | ethoxy)-ethoxy]-acetyl)₂-(γGlu)-CO-(CH₂)₁₆-CO₂H)AQ-αMe4Pal-EFIE- | | | |
| | | | αMeY-LIE-Aib-SPSSGAPPPSK(PEG₂₄-BEA-MalDap₂-Fc)-NH₂ | | | |
| 392 | | 848 | Y-Aib-QGT-αMeF(2F)-TSD-4Pal-αMeS-I-αMeL-LD-Orn-K(2-[2-(2-amino- | 132 | 385 | 935 |
| | | | ethoxy)-ethoxy]-acetyl)₂-(γGlu)-CO-(CH₂)₁₆-CO₂H)AQ-αMe4Pal-EFIQ- | | | |
| | | | αMeY-LIE-Aib-SPSSGAPPPSK(PEG₂₄-BEA-MalDap₂-Fc)-NH₂ | | | |
| 393 | | 849 | Y-Aib-QGT-αMeF(2F)-TSD-4Pal-αMeS-I-αMeL-LD-Orn-K(2-[2-(2-amino- | 133 | 386 | 935 |
| | | | ethoxy)-ethoxy]-acetyl)₂-(γGlu)-CO-(CH₂)₁₆-CO₂H)AQ-αMe4Pal-EFIE- | | | |
| | | | αMeY-LIE-Aib-SPSSGAPPPSK(PEG₂₄-BEA-MalDap₂-Fc)-NH₂ | | | |
| 394 | | 850 | Y-Aib-QGT-αMeF(2F)-TSDY-αMeS-I-αMeL-LD-Orn-K(2-[2-(2-amino- | 127 | 387 | 935 |
| | | | ethoxy)-ethoxy]-acetyl)-(γGlu)-CO-(CH₂)₁₆-CO₂H)AQ-αMe4Pal-EFIQ- | | | |
| | | | αMeY-LIE-Aib-SPSSGAPPPSK(PEG₂₄-BEA-MalDap₂-Fc)-NH₂ | | | |
| 395 | | 851 | Y-Aib-QGT-αMeF(2F)-TSDY-αMeS-I-αMeL-LDEK(2-[2-(2-amino-ethoxy)- | 134 | 388 | 935 |
| | | | ethoxy]-acetyl)-(γGlu)-CO-(CH₂)₁₆-CO₂H)AQ-αMe4Pal-EFIQ-αMeY- | | | |
| | | | LLEGSPSSGAPPPSK(PEG₂₄-BEA-MalDap₂-Fc)-NH₂ | | | |
| 396 | | 852 | Y-Aib-QGT-αMeF(2F)-TSDY-αMeS-I-αMeL-LDEK(2-[2-(2-amino-ethoxy)- | 135 | 389 | 935 |
| | | | ethoxy]-acetyl)-(γGlu)-CO-(CH₂)₁₆-CO₂H)AQ-αMe4Pal-EFIQ-αMeY-LLE- | | | |
| | | | Aib-SPSSGAPPPSK(PEG₂₄-BEA-MalDap₂-Fc)-NH₂ | | | |
| 397 | | 853 | H-Aib-QGT-αMeF(2F)-TSDY-αMeS-I-αMeL-LD-Orn-K(2-[2-(2-amino- | 136 | 390 | 935 |
| | | | ethoxy)-ethoxy]-acetyl)₂-(γGlu)-CO-(CH₂)₁₆-CO₂H)AQ-αMe4Pal-EFIQ- | | | |
| | | | αMeY-LIEGSPSSGAPPPSK(PEG₂₄-BEA-MalDap₂-Fc)-NH₂ | | | |
| 398 | | 854 | Y-Aib-QGT-αMeF(2F)-TSDY-αMeS-I-αMeL-LD-Orn-K(2-12-(2-amino- | 137 | 391 | 935 |
| | | | ethoxy)-ethoxy]-acetyl)₂-(γGlu)-CO-(CH₂)₁₆-CO₂H)AQ-αMe4Pal-EFIQ- | | | |
| | | | αMeY-LVEGSPSSGAPPPSK(PEG₂₄-BEA-MalDap₂-Fc)-NH₂ | | | |
| 399 | | 855 | Y-Aib-QGT-αMeF(2F)-TSDY-αMeS-I-αMeL-LD-Orn-K(2-[2-(2-amino- | 138 | 392 | 935 |
| | | | ethoxy)-ethoxy]-acetyl)₂-(γGlu)-CO-(CH₂)₁₆-CO₂H)AQ-αMe4Pal-EFIQ- | | | |
| | | | αMeY-LIEGGGGGGGSGGGGSGGGGSK(BEA-MalDap₂-Fc)-NH₂ | | | |
| 400 | | 856 | Y-Aib-QGT-αMeF(2F)-TSDY-αMeS-I-αMeL-LD-Orn-K(2-12-(2-amino- | 114 | 366 | 935 |
| | | | ethoxy)-ethoxy]-acetyl)₂-(γGlu)-CO-(CH₂)₁₆-CO₂H)AQ-αMe4Pal-EFIQ- | | | |
| | | | αMeY-LIEGSPSSGAPPPSK(2-[2-(2-amino-ethoxy)-ethoxy]-acetyl)₆-BEA- | | | |
| | | | MalDap₂-Fc)-NH₂ | | | |
| 401 | | 857 | H-Aib-HGT-αMeF(2F)-TSDY-αMeS-I-αMeL-LD-Orn-K(2-[2-(2-amino- | 139 | 393 | 935 |
| | | | ethoxy)-ethoxy]-acetyl)₂-(γGlu)-CO-(CH₂)₁₆-CO₂H)AQ-Aib-EFIQ-αMeY- | | | |
| | | | LLEGSPSSGAPPPSK(PEG₂₄-BEA-MalDap2-Fc)-NH₂ | | | |
| 402 | | 858 | H-Aib-HGT-αMeF(2F)-TSD-4Pal-SI-αMeL-LD-Orn-K(2-[2-(2-amino- | 140 | 394 | 935 |
| | | | ethoxy)-ethoxy]-acetyl)₂-(γGlu)-CO-(CH₂)₁₆-CO₂H)AQ-αMe4Pal-EFIQ- | | | |
| | | | αMeY-LLEGSPSSGAPPPSK(PEG₂₄-BEA-MalDap₂-Fc)-NH₂ | | | |
| 403 | 27 | 859 | Y-Aib-QGT-αMeF(2F)-TSDY-αMeS-I-αMeL-LD-Orn-K(2-[2-(2-amino- | 128 | 395 | 935 |
| | | | ethoxy)-ethoxy]-acetyl)-(γGlu)-CO-(CH₂)₁₆-CO₂H)AQ-αMe4Pal-EFIE- | | | |
| | | | αMeY-LIEGSPSSGAPPPSK(PEG₂₄-BEA-MalDap₂-Fc)-NH₂ | | | |
| 404 | | 860 | Y-Aib-QGT-αMeF(2F)-TSD-4Pal-αMeS-I-αMeL-LD-Orn-K(2-[2-(2-amino- | 129 | 396 | 935 |
| | | | ethoxy)-ethoxy]-acetyl)-(γGlu)-CO-(CH₂)₁₆-CO₂H)AQ-αMe4Pal-EFIQ- | | | |
| | | | αMeY-LIEGSPSSGAPPPSK(PEG₂₄-BEA-MalDap2-Fc)-NH₂ | | | |
| 405 | | 861 | Y-Aib-QGT-αMeF(2F)-TSDY-αMeS-I-αMeL-LD-Orn-K(2-[2-(2-amino- | 141 | 397 | 935 |
| | | | ethoxy)-ethoxy]-acetyl)₂-(γGlu)-CO-(CH₂)₁₆-CO₂H)AQ-αMe4Pal-DFIQ- | | | |
| | | | αMeY-LIEGSPSSGAPPPSK(2-[2-(2-amino-ethoxy)-ethoxy]-acetyl)₆-BEA- | | | |
| | | | MalDap₂-Fc)-NH₂ | | | |
| 406 | | 862 | Y-Aib-QGT-αMeF(2F)-TSDY-αMeS-I-αMeL-LD-Orn-K(2-[2-(2-amino- | 142 | 398 | 935 |
| | | | ethoxy)-ethoxy]-acetyl)₂₋(γGlu)-CO-(CH₂)₁₆-CO₂H)AQ-αMe4Pal-Orn-FIE- | | | |
| | | | αMeY-LIA-Aib-SPSSGAPPPSK(2-[2-(2-amino-ethoxy)-ethoxy]-acetyl)₆- | | | |
| | | | BEA-MalDap₂-Fc)-NH₂ | | | |
| 407 | | 863 | Y-Aib-QGT-αMeF(2F)-TSDY-αMeS-I-αMeL-LD-Orn-K(2-[2-(2-amino- | 116 | 368 | 935 |
| | | | ethoxy)-ethoxy]-acetyl)2-(γGlu)-CO-(CH2)16-CO2H)AQ-αMe4Pal-EFIQ- | | | |
| | | | αMeY-LLEGSPSSGAPPPS-K(2-[2-(2-amino-ethoxy)-ethoxy]-acetyl)₆-BEA- | | | |
| | | | MalDap₂-Fc)-NH₂ | | | |
| 408 | | 864 | Y-Aib-QGT-αMeF(2F)-TSDY-αMeS-I-αMeL-LD-Orn-K(2-[2-(2-amino- | 143 | 399 | 935 |
| | | | ethoxy)-ethoxy]-acetyl)₂-(γGlu)-CO-(CH₂)₁₆-CO₂H)AQ-αMe4Pal-EFIQ- | | | |
| | | | αMeY-LLE-Aib-SPSSGAPPPSK(2-[2-(2-amino-ethoxy)-ethoxy]-acetyl)₆- | | | |
| | | | BEA-MalDap₂-Fc)-NH₂ | | | |
| 409 | | 865 | H-Aib-QGT-αMeF(2F)-TSDY-αMeS-I-αMeL-LD-Orn-KAQ-αMe4Pal-EFIE- | 144 | 400 | 935 |
| | | | αMeY-LIEGSPSSGAPPPSK(PEG₂₄-BEA-MalDap₂-Fc)-NH₂ | | | |
| 410 | | 866 | H-Aib-QGT-αMeF(2F)-TSDY-αMeS-I-αMeL-LD-Orn-K(2-[2-(2-amino- | 145 | 401 | 935 |
| | | | ethoxy)-ethoxy]-acetyl)₂-(γGlu)-CO-(CH₂)₁₆-CO₂H)AQ-αMe4Pal-EFIE- | | | |
| | | | αMeY-LIE-Aib-SPSSGAPPPSK(PEG₂₄-BEA-MalDap₂-Fc)-NH₂ | | | |
| 411 | | 867 | H-Aib-QGT-αMeF(2F)-TSDY-αMeS-I-αMeL-LD-Orn-K(2-[2-(2-amino- | 146 | 402 | 935 |
| | | | ethoxy)-ethoxy]-acetyl)₂-(γGlu)-CO-(CH₂)₁₆-CO₂H)AQ-αMe4Pal-EFIE- | | | |
| | | | αMeY-LLEGSPSSGAPPPSK(PEG₂₄-BEA-MalDap₂-Fc)-NH₂ | | | |
| 412 | | 868 | H-Aib-QGT-αMeF(2F)-TSDY-αMeS-I-αMeL-LD-Orn-K(2-[2-(2-amino- | 147 | 403 | 935 |
| | | | ethoxy)-ethoxy]-acetyl)₂-(γGlu)-CO-(CH₂)₁₆-CO₂H)AQ-αMe4Pal-EFIE- | | | |
| | | | αMeY-LLE-Aib-SPSSGAPPPSK(PEG₂₄-BEA-MalDap₂-Fc)-NH₂ | | | |
| 413 | 28 | 869 | H-Aib-QGT-αMeF(2F)-TSDY-αMeS-I-αMeL-LD-Orn-K(2-[2-(2-amino- | 144 | 404 | 935 |
| | | | ethoxy)-ethoxy]-acetyl)-(γGlu)-CO-(CH₂)₁₆-CO₂H)AQ-αMe4Pal-EFIE- | | | |
| | | | αMeY-LIEGSPSSGAPPPSK(PEG24-BEA-MalDap₂-Fc)-NH₂ | | | |
| 414 | | 870 | H-Aib-QGT-αMeF(2F)-TSDY-αMeS-I-αMeL-LD-Orn-K(2-[2-(2-amino- | 145 | 405 | 935 |
| | | | ethoxy)-ethoxy]-acetyl)-(γGlu)-CO-(CH₂)₁₆-CO₂H)AQ-αMe4Pal-EFIE- | | | |
| | | | αMeY-LIE-Aib-SPSSGAPPPSK(PEG₂₄-BEA-MalDap₂-Fc)-NH₂ | | | |
| 415 | | 871 | H-Aib-QGT-αMeF(2F)-TSDY-αMeS-I-αMeL-LD-Orn-K(2-12-(2-amino- | 146 | 406 | 935 |
| | | | ethoxy)-ethoxy]-acetyl)-(γGlu)-CO-(CH₂)₁₆-CO₂H)AQ-αMe4Pal-EFIE- | | | |
| | | | αMeY-LLEGSPSSGAPPPSK(PEG₂₄-BEA-MalDap₂-Fc)-NH₂ | | | |
| 416 | | 872 | H-Aib-QGT-αMeF(2F)-TSDY-αMeS-I-αMeL-LD-Orn-K(2-12-(2-amino- | 148 | 407 | 935 |
| | | | ethoxy)-ethoxy]-acetyl)₂-(γGlu)-CO-(CH₂)₁₆-CO₂H)AQ-αMe4Pal-EFIQ- | | | |
| | | | αMeY-LIE-Aib-SPSSGAPPPSK(PEG₂₄-BEA-MalDap₂-Fc)-NH₂ | | | |
| 417 | | 873 | H-Aib-QGT-αMeF(2F)-TSDY-αMeS-I-αMeL-LD-Orn-K(2-12-(2-amino- | 149 | 408 | 935 |
| | | | ethoxy)-ethoxy]-acetyl)₂-(γGlu)-CO-(CH₂)₁₆-CO₂H)AQ-αMe4Pal-EFIQ- | | | |
| | | | αMeY-LLE-Aib-SPSSGAPPPSK(PEG₂₄-BEA-MalDap₂-Fc)-NH₂ | | | |
| 418 | | 874 | H-Aib-QGT-αMeF(2F)-TSDY-αMeS-I-αMeL-LD-Orn-K(2-[2-(2-amino- | 148 | 409 | 935 |
| | | | ethoxy)-ethoxy]-acetyl)-(γGlu)-CO-(CH₂)₁₆-CO₂H)AQ-αMe4Pal-EFIQ- | | | |
| | | | αMeY-LIE-Aib-SPSSGAPPPSK(PEG24-BEA-MalDap₂-Fc)-NH₂ | | | |
| 419 | | 875 | H-Aib-QGT-αMeF(2F)-TSDY-αMeS-I-αMeL-LD-Orn-K(2-[2-(2-amino- | 149 | 410 | 935 |
| | | | ethoxy)-ethoxy]-acetyl)-(γGlu)-CO-(CH₂)₁₆-CO₂H)AQ-αMe4Pal-EFIQ- | | | |
| | | | αMeY-LLE-Aib-SPSSGAPPPSK(PEG24-BEA-MalDap₂-Fc)-NH₂ | | | |
| 420 | | 876 | Y-αMeS-QGT-αMeF(2F)-TSDY-αMeS-I-αMeL-LD-Orn-K(2-[2-(2-amino- | 150 | 411 | 935 |
| | | | ethoxy)-ethoxy]-acetyl)-(γGlu)-CO-(CH₂)₁₆-CO₂H)AQ-αMe4Pal-EFIE- | | | |
| | | | αMeY-LIEGSPSSGAPPPSK(PEG24-BEA-MalDap₂-Fc)-NH₂ | | | |
| 421 | | 877 | Y-Iva-QGT-αMeF(2F)-TSDY-αMeS-I-αMeL-LD-Orn-K(2-[2-(2-amino- | 151 | 412 | 935 |
| | | | ethoxy)-ethoxy]-acetyl)-(γGlu)-CO-(CH₂)₁₆-CO₂H)AQ-αMe4Pal-EFIE- | | | |
| | | | αMeY-LIEGSPSSGAPPPSK(PEG24-BEA-MalDap₂-Fc)-NH₂ | | | |
| 422 | | 878 | Y-Ac4c-QGT-αMeF(2F)-TSDY-αMeS-I-αMeL-LD-Orn-K(2-[2-(2-amino- | 152 | 413 | 935 |
| | | | ethoxy)-ethoxy]-acetyl)-(γGlu)-CO-(CH₂)₁₆-CO₂H)AQ-αMe4Pal-EFIE- | | | |
| | | | αMeY-LIEGSPSSGAPPPSK(PEG₂₄-BEA-MalDap₂-Fc)-NH₂ | | | |
| 423 | | 879 | H-Aib-QGT-αMeF(2F)-TSDY-αMeS-I-αMeL-LD-Orn-K(2-[2-(2-amino- | 153 | 414 | 935 |
| | | | ethoxy)-ethoxy]-acetyl)-(γGlu)-CO-(CH₂)₁₆-CO₂H)AQ-αMe4Pal-Orn- | | | |
| | | | FIK(PEG₂₄-BEA-MalDap₂-Fc)-αMeY-LLEGSPSSGAPPPS-NH₂ | | | |
| 424 | | 880 | H-Aib-QGT-αMeF(2F)-TSDY-αMeS-I-αMeL-LD-Orn-K(2-12-(2-amino- | 154 | 415 | 935 |
| | | | ethoxy)-ethoxy]-acetyl)-(γGlu)-CO-(CH₂)₁₆-CO₂H)AQ-αMe4Pal- | | | |
| | | | EFIK(PEG₂₄-BEA-MalDap₂-Fc)-αMeY-LLEGSPSSGAPPPS-NH₂ | | | |
| 425 | | 881 | H-Aib-QGT-αMeF(2F)-TSDY-αMeS-I-αMeL-LD-Orn-K(2-[2-(2-amino- | 155 | 416 | 935 |
| | | | ethoxy)-ethoxy]-acetyl)-(γGlu)-CO-(CH₂)1₆-CO₂H)AQ-αMe4Pal-Orn-FIe- | | | |
| | | | αMeY-LIEGSPSSGAPPPSK(PEG₂₄-BEA-MalDap₂-Fc)-NH₂ | | | |
| 426 | | 882 | H-Aib-QGT-αMeF(2F)-TSDY-αMeS-I-αMeL-LD-Orn-K(2-12-(2-amino- | 156 | 417 | 935 |
| | | | ethoxy)-ethoxy]-acetyl)-(γGlu)-CO-(CH₂)₁₆-CO₂H)AQ-αMe4Pal-Orn-FIe- | | | |
| | | | αMeY-LLEGSPSSGAPPPSK(PEG₂₄-BEA-MalDap₂-Fc)-NH₂ | | | |
| 427 | | 883 | H-Aib-QGT-αMeF(2F)-TSDY-αMeS-I-αMeL-LD-Orn-K(2-[2-(2-amino- | 157 | 418 | 935 |
| | | | ethoxy)-ethoxy]-acetyl)-(γGlu)-CO-(CH₂)₁₆-CO₂H)AQ-αMe4Pal-Orn-FIE- | | | |
| | | | αMeY-LIEGSPSSGAPPPSK(PEG₂₄-BEA-MalDap₂-Fc)-NH₂ | | | |
| 428 | | 884 | H-Aib-QGT-αMeF(2F)-TSDY-αMeS-I-αMeL-LD-Orn-K(2-[2-(2-amino- | 158 | 419 | 935 |
| | | | ethoxy)-ethoxy]-acetyl)-(γGlu)-CO-(CH₂)₁₆-CO₂H)AQ-αMe4Pal-Orn-FIE- | | | |
| | | | αMeY-LLEGSPSSGAPPPSK(PEG₂₄-BEA-MalDap₂-Fc)-NH₂ | | | |
| 429 | | 885 | Y-Aib-QGT-αMeF(2F)-TSDY-αMeS-I-αMeL-LD-Orn-K(2-[2-(2-amino- | 159 | 420 | 935 |
| | | | ethoxy)-ethoxy]-acetyl)-(γGlu)-CO-(CH₂)₁₆-CO₂H)AQ-αMe4Pal-EFIE- | | | |
| | | | αMeY-LLEGSPSSGAPPPSK(PEG₂₄-BEA-MalDap₂-Fc)-NH₂ | | | |
| 430 | | 886 | Y-Aib-QGT-αMeF(2F)-TSDY-αMeS-I-αMeL-LD-Orn-K(2-[2-(2-amino- | 160 | 421 | 935 |
| | | | ethoxy)-ethoxy]-acetyl)-(γGlu)-CO-(CH₂)₁₆-CO₂H)AQ-αMe4Pal-EFIe-αMeY- | | | |
| | | | LLEGSPSSGAPPPSK(PEG₂₄-BEA-MalDap₂-Fc)-NH₂ | | | |
| 431 | | 887 | Y-Aib-QGT-αMeF(2F)-TSDY-αMeS-I-αMeL-LD-Orn-K(2-[2-(2-amino- | 161 | 422 | 935 |
| | | | ethoxy)-ethoxy]-acetyl)-(γGlu)-CO-(CH₂)₁₆-CO₂H)AQ-αMe4Pal-Orn-FIE- | | | |
| | | | αMeY-LLEGSPSSGAPPPSK(PEG₂₄-BEA-MalDap₂-Fc)-NH₂ | | | |
| 432 | | 888 | Y-Aib-QGT-αMeF(2F)-TSDY-αMeS-I-αMeL-LD-Orn-K(2-[2-(2-amino- | 162 | 423 | 935 |
| | | | ethoxy)-ethoxy]-acetyl)-(γGlu)-CO-(CH₂)₁₆-CO₂H)AQ-αMe4Pal-Orn-FIe- | | | |
| | | | αMeY-LLEGSPSSGAPPPSK(PEG₂₄-BEA-MalDap₂-Fc)-NH₂ | | | |
| 433 | 29 | 889 | Y-Aib-QGT-αMeF(2F)-TSDY-αMeS-I-αMeL-LD-Orn-K(2-[2-(2-amino- | 113 | 424 | 935 |
| | | | ethoxy)-ethoxy]-acetyl)-(γGlu)-CO-(CH₂)₁₆-CO₂H)AQ-αMe4Pal-EFIe-αMeY- | | | |
| | | | LIEGSPSSGAPPPSK(PEG₂₄-BEA-MalDap₂-Fc)-NH₂ | | | |
| 434 | | 890 | Y-Aib-QGT-αMeF(2F)-TSDY-αMeS-I-aML-LD-Orn-K(2-[2-(2-amino- | 98 | 425 | 935 |
| | | | ethoxy)-ethoxy]-acetyl)-(γGlu)-CO-(CH₂)₁₆-CO₂H)AQ-αMe4Pal-Orn-FIE- | | | |
| | | | αMeY-LIEGSPSSGAPPPSK(PEG₂₄-BEA-MalDap₂-Fc)-NH₂ | | | |
| 435 | 30 | 891 | Y-Aib-QGT-αMeF(2F)-TSDY-αMeS-I-αMeL-LD-Orn-K(2-12-(2-amino- | 97 | 426 | 935 |
| | | | ethoxy)-ethoxy]-acetyl)-(γGlu)-CO-(CH₂)₁₆-CO₂H)AQ-αMe4Pal-Orn-FIe- | | | |
| | | | αMeY-LIEGSPSSGAPPPSK(PEG₂₄-BEA-MalDap₂-Fc)-NH₂ | | | |
| 436 | | 892 | Y-Aib-QGT-αMeF(2F)-TSDY-αMeS-I-αMeL-LD-Orn-K(2-[2-(2-amino- | 163 | 427 | 935 |
| | | | ethoxy)-ethoxy]-acetyl)-(γGlu)-CO-(CH₂)₁₆-CO₂H)AQ-Aib-QFIE-αMeY- | | | |
| | | | LLEGSPSSGAPPPSK(PEG₂₄-BEA-MalDap₂-Fc)-NH₂ | | | |
| 437 | | 893 | Y-Aib-QGT-αMeF(2F)-TSDY-αMeS-I-αMeL-LD-Orn-K(2-[2-(2-amino- | 164 | 428 | 935 |
| | | | ethoxy)-ethoxy]-acetyl)-(γGlu)-CO-(CH₂)₁₆-CO₂H)AQ-Aib-Orn-FIe-αMeY- | | | |
| | | | LLEGSPSSGAPPPSK(PEG₂₄-BEA-MalDap₂-Fc)-NH₂ | | | |
| 438 | | 894 | Y-Aib-QGT-αMeF(2F)-TSDY-αMeS-I-αMeL-LD-Orn-K(2-12-(2-amino- | 165 | 429 | 935 |
| | | | ethoxy)-ethoxy]-acetyl)-(γGlu)-CO-(CH₂)₁₆-CO₂H)AQ-Aib-Orn-FIE-αMeY- | | | |
| | | | LLEGSPSSGAPPPSK(PEG₂₄-BEA-MalDap2-Fc)-NH₂ | | | |
| 439 | | 895 | Y-Aib-QGT-αMeF(2F)-TSDY-αMeS-I-αMeL-LD-Orn-K(2-[2-(2-amino- | 166 | 430 | 935 |
| | | | ethoxy)-ethoxy]-acetyl)-(γGlu)-CO-(CH₂)₁₆-CO₂H)AQ-Aib-Orn-FIq-αMeY- | | | |
| | | | LLEGSPSSGAPPPSK(PEG₂₄-BEA-MalDap₂-Fc)-NH₂ | | | |
| 440 | | 896 | Y-Aib-QGT-αMeF(2F)-TSDY-αMeS-I-αMeL-LD-Orn-K(2-[2-(2-amino- | 167 | 431 | 935 |
| | | | ethoxy)-ethoxy]-acetyl)-(γGlu)-CO-(CH₂)₁₆-CO₂H)AQ-Aib-Orn-FIQ-αMeY- | | | |
| | | | LLEGSPSSGAPPPSK(PEG₂₄-BEA-MalDap₂-Fc)-NH₂ | | | |
| 441 | | 897 | Y-Aib-QGT-αMeF(2F)-TSDY-αMeS-I-αMeL-LD-Orn-K(2-12-(2-amino- | 168 | 432 | 935 |
| | | | ethoxy)-ethoxy]-acetyl)-(γGlu)-CO-(CH₂)₁₆-CO₂H)AQ-Aib-EFIe-αMeY- | | | |
| | | | LLEGSPSSGAPPPSK(PEG₂₄-BEA-MalDap₂-Fc)-NH₂ | | | |
| 442 | | 898 | Y-Aib-QGT-αMeF(2F)-TSDY-αMeS-I-αMeL-LD-Orn-K(2-[2-(2-amino- | 169 | 433 | 935 |
| | | | ethoxy)-ethoxy]-acetyl)-(γGlu)-CO-(CH₂)₁₆-CO₂H)AQ-Aib-EFIE-αMeY- | | | |
| | | | LLEGSPSSGAPPPSK(PEG₂₄-BEA-MalDap₂-Fc)-NH₂ | | | |
| 443 | | 899 | Y-Aib-QGT-αMeF(2F)-TSDY-αMeS-I-αMeL-LD-Orn-K(2-[2-(2-amino- | 170 | 434 | 935 |
| | | | ethoxy)-ethoxy]-acetyl)-(γGlu)-CO-(CH₂)₁₆-CO₂H)AQ-Aib-EFIq-αMeY- | | | |
| | | | LLEGSPSSGAPPPSK(PEG₂₄-BEA-MalDap₂-Fc)-NH₂ | | | |
| 444 | 31 | 900 | H-Ac4c-QGT-αMeF(2F)-TSDY-αMeS-I-αMeL-LD-Orn-K(2-[2-(2-amino- | 171 | 435 | 935 |
| | | | ethoxy)-ethoxy]-acetyl)-(γGlu)-CO-(CH₂)₁₆-CO₂H)AQ-αMe4Pal-EFIE- | | | |
| | | | αMeY-LIEGSPSSGAPPPSK(PEG₂₄-BEA-MalDap₂-Fc)-NH₂ | | | |
| 445 | | 901 | YaQGT-αMeF(2F)-TSDY-αMeS-I-αMeL-LD-Orn-K(2-[2-(2-amino-ethoxy)- | 172 | 436 | 935 |
| | | | ethoxy]-acetyl)-(γGlu)-CO-(CH₂)₁₆-CO₂H)AQ-αMe4Pal-EFIE-αMeY- | | | |
| | | | LIEGSPSSGAPPPSK(PEG₂₄-BEA-MalDap₂-Fc)-NH₂ | | | |
| 446 | | 902 | YaQGT-αMeF(2F)-TSDY-αMeS-I-αMeL-LD-Orn-K(2-[2-(2-amino-ethoxy)- | 173 | 437 | 935 |
| | | | ethoxy]-acetyl)-(γGlu)-CO-(CH₂)₁₆-CO₂H)AQ-αMe4Pal-Orn-FIE-αMeY- | | | |
| | | | LIEGSPSSGAPPPSK(PEG₂₄-BEA-MalDap₂-Fc)-NH₂ | | | |
| 447 | | 903 | YaQGT-αMeF(2F)-TSDY-αMeS-I-αMeL-LD-Orn-K(2-[2-(2-amino-ethoxy)- | 174 | 438 | 935 |
| | | | ethoxy]-acetyl)-(γGlu)-CO-(CH₂)₁₆-CO₂H)AQ-αMe4Pal-Orn-FIe-αMeY- | | | |
| | | | LIEGSPSSGAPPPSK(PEG₂₄-BEA-MalDap₂-Fc)-NH₂ | | | |
| 448 | | 904 | YaQGT-αMeF(2F)-TSDY-αMeS-I-αMeL-LD-Orn-K(2-[2-(2-amino-ethoxy)- | 175 | 439 | 935 |
| | | | ethoxy]-acetyl)-(γGlu)-CO-(CH₂)₁₆-CO₂H)AQ-αMe4Pal-EFIE-αMeY- | | | |
| | | | LLEGSPSSGAPPPSK(PEG₂₄-BEA-MalDap₂-Fc)-NH₂ | | | |
| 449 | | 905 | YaQGT-αMeF(2F)-TSDY-αMeS-I-αMeL-LD-Orn-K(2-[2-(2-amino-ethoxy)- | 176 | 440 | 935 |
| | | | ethoxy]-acetyl)-(γGlu)-CO-(CH₂)₁₆-CO₂H)AQ-αMe4Pal-EFIe-αMeY- | | | |
| | | | LLEGSPSSGAPPPSK(PEG₂₄-BEA-MalDap₂-Fc)-NH₂ | | | |
| 450 | | 906 | YaQGT-αMeF(2F)-TSDY-αMeS-I-αMeL-LD-Orn-K(2-[2-(2-amino-ethoxy)- | 177 | 441 | 935 |
| | | | ethoxy]-acetyl)-(γGlu)-CO-(CH₂)₁₆-CO₂H)AQ-αMe4Pal-Orn-FIE-αMeY- | | | |
| | | | LLEGSPSSGAPPPSK(PEG₂₄-BEA-MalDap₂-Fc)-NH₂ | | | |
| 451 | | 907 | YaQGT-αMeF(2F)-TSDY-αMeS-I-αMeL-LD-Orn-K(2-[2-(2-amino-ethoxy)- | 178 | 442 | 935 |
| | | | ethoxy]-acetyl)-(γGlu)-CO-(CH₂)₁₆-CO₂H)AQ-Aib-Orn-FIq-αMeY- | | | |
| | | | LLEGSPSSGAPPPSK(PEG₂₄-BEA-MalDap₂-Fc)-NH₂ | | | |
| 452 | | 908 | YaQGT-αMeF(2F)-TSDY-αMeS-I-αMeL-LD-Orn-K(2-[2-(2-amino-ethoxy)- | 179 | 443 | 935 |
| | | | ethoxy]-acetyl)-(γGlu)-CO-(CH₂)₁₆-CO₂H)AQ-Aib-Orn-FIQ-αMeY- | | | |
| | | | LLEGSPSSGAPPPSK(PEG₂₄-BEA-MalDap₂-Fc)-NH₂ | | | |
| 453 | | 909 | YaQGT-aMcF(2F)-TSDY-αMeS-I-αMeL-LD-Orn-K(2-[2-(2-amino-ethoxy)- | 180 | 444 | 935 |
| | | | ethoxy]-acetyl)-(γGlu)-CO-(CH₂)₁₆-CO₂H)AQ-Aib-Orn-FIE-αMeY- | | | |
| | | | LIEGSPSSGAPPPSK(PEG₂₄-BEA-MalDap₂-Fc)-NH₂ | | | |
| 454 | | 910 | Y-Aib-QGT-αMeF(2F)-TSD-4Pal-SI-αMeL-LD-Orn-K(2-[2-(2-amino- | 94 | 445 | 935 |
| | | | ethoxy)-ethoxy]-acetyl)-(γGlu)-CO-(CH₂)₁₆-CO₂H)AQ-αMe4Pal-Orn-FIE- | | | |
| | | | αMeY-LIEGSPSSGAPPPSK(PEG₂₄-BEA-MalDap₂-Fc)-NH₂ | | | |
| 455 | | 911 | Y-Aib-QGT-αMeF(2F)-TSD-4Pal-αMeS-I-αMeL-LD-Orn-K(2-[2-(2-amino- | 95 | 446 | 935 |
| | | | ethoxy)-ethoxy]-acetyl)-(γGlu)-CO-(CH₂)₁₆-CO₂H)AQ-αMe4Pal-Orn-FIe- | | | |
| | | | αMeY-LIEGSPSSGAPPPSK(PEG₂₄-BEA-MalDap₂-Fc)-NH₂ | | | |
| 456 | 35 | 912 | Y-Aib-QGT-αMeF(2F)-TSD-4Pal-αMeS-I-αMeL-LD-Orn-K(2-[2-(2-amino- | 130 | 447 | 935 |
| | | | ethoxy)-ethoxy]-acetyl)-(γGlu)-CO-(CH₂)₁₆-CO₂H)AQ-αMe4Pal-EFIE- | | | |
| | | | αMeY-LIEGSPSSGAPPPSK(PEG₂₄-BEA-MalDap₂-Fc)-NH₂ | | | |
| 457 | | 913 | Y-Aib-QGT-αMeF(2F)-TSD-4Pal-SI-αMeL-LD-Orn-K(2-[2-(2-amino- | 181 | 448 | 935 |
| | | | ethoxy)-ethoxy]-acetyl)-(γGlu)-CO-(CH₂)₁₆-CO₂H)AQ-αMe4Pal-EFIE- | | | |
| | | | αMeY-LIEGSPSSGAPPPSK(PEG₂₄-BEA-MalDap₂-Fc)-NH₂ | | | |
| 458 | | 914 | Y-Aib-QGT-αMeF(2F)-TSDY-αMeS-I-αMeL-LD-Orn-K(2-[2-(2-amino- | 182 | 449 | 935 |
| | | | ethoxy)-ethoxy]-acetyl)-(γGlu)-CO-(CH₂)₁₆-CO₂H)AQ-Aib-Orn-FIE-αMeY- | | | |
| | | | LIEGSPSSGAPPPSK(PEG₂₄-BEA-MalDap₂-Fc)-NH₂ | | | |
| 459 | 38 | 915 | Y-Aib-QGT-αMeF(2F)-TSD-4Pal-αMeS-I-αMeL-LD-Orn-K(2-[2-(2-amino- | 183 | 450 | 935 |
| | | | ethoxy)-ethoxy]-acetyl)-(γGlu)-CO-(CH₂)₁₆-CO₂H)AQ-αMe4Pal-EFIe-αMeY- | | | |
| | | | LIEGSPSSGAPPPSK(PEG₂₄-BEA-MalDap₂-Fc)-NH₂ | | | |
| 460 | | 916 | YaQGT-αMeF(2F)-TSDY-αMeS-I-αMeL-LD-Orn-K(2-[2-(2-amino-ethoxy)- | 173 | 451 | 935 |
| | | | ethoxy]-acetyl)₂-(γGlu)-CO-(CH2)16-CO2H)AQ-αMe4Pal-Orn-FIE-αMeY- | | | |
| | | | LIEGSPSSGAPPPSK(PEG24-BEA-MalDap2-Fc)-NH2 | | | |
| 461 | | 917 | YaQGT-αMeF(2F)-TSDY-αMeS-I-αMeL-LD-Orn-K(2-[2-(2-amino-ethoxy)- | 177 | 452 | 935 |
| | | | ethoxy]-acetyl)₂-(γGlu)-CO-(CH₂)₁₆-CO₂H)AQ-αMe4Pal-Orn-FIE-αMeY- | | | |
| | | | LLEGSPSSGAPPPSK(PEG₂₄-BEA-MalDap₂-Fc)-NH₂ | | | |
| 462 | | 918 | Y-Aib-QGT-αMeF(2F)-TSDY-αMeS-I-αMeL-LD-Orn-K(2-[2-(2-amino- | 184 | 453 | 935 |
| | | | ethoxy)-ethoxy]-acetyl)-(γGlu)-CO-(CH₂)₁₆-CO₂H)AQ-Aib-Orn-FIe-αMeY- | | | |
| | | | LIEGSPSSGAPPPSK(PEG₂₄-BEA-MalDap₂-Fc)-NH₂ | | | |
| 463 | | 919 | NMeY-Aib-QGT-αMeF(2F)-TSDY-αMeS-I-αMeL-LD-Orn-K(2-[2-(2-amino- | 185 | 454 | 935 |
| | | | ethoxy)-ethoxy]-acetyl)₂-(γGlu)-CO-(CH₂)₁₆-CO₂H)AQ-αMe4Pal-EFIE- | | | |
| | | | αMeY-LIEGSPSSGAPPPSK(PEG₂₄-BEA-MalDap₂-Fc)-NH₂ | | | |
| 464 | | 920 | Y-Aib-QGT-αMeF(2F)-TSDY-αMeS-I-αMeL-LD-Orn-K(2-12-(2-amino- | 97 | 455 | 935 |
| | | | ethoxy)-ethoxy]-acetyl)₂-(γGlu)-CO-(CH₂)₁₈-CO₂H)AQ-αMe4Pal-Orn-FIe- | | | |
| | | | αMeY-LIEGSPSSGAPPPSK(PEG24-BEA-MalDap₂-Fc)-NH₂ | | | |
| 465 | | 921 | Y-Aib-QGT-αMeF(2F)-TSDY-αMeS-I-αMeL-LD-Orn-K(2-12-(2-amino- | 111 | 456 | 935 |
| | | | ethoxy)-ethoxy]-acetyl)₂-(γGlu)-CO-(CH₂)₁₈-CO₂H)AQ-αMe4Pal-Orn-FIQ- | | | |
| | | | αMeY-LIEGSPSSGAPPPSK(PEG₂₄-BEA-MalDap₂-Fc)-NH₂ | | | |
| 466 | | 922 | Y-Aib-QGT-αMeF(2F)-TSD-4Pal-αMeS-I-αMeL-LD-Orn-K(2-[2-(2-amino- | 95 | 335 | 936 |
| | | | ethoxy)-ethoxy]-acetyl)₂-(γGlu)-CO-(CH₂)₁₆-CO₂H)AQ-αMe4Pal-Orn-FIe- | | | |
| | | | αMeY-LIEGSPSSGAPPPSK(PEG₂₄-BEA-MalDap₂-Fc KRQ)-NH₂ | | | |
| 467 | | 923 | Y-Aib-QGT-αMeF(2F)-TSDY-αMeS-I-αMeL-LD-Orn-K(2-12-(2-amino- | 97 | 337 | 936 |
| | | | ethoxy)-ethoxy]-acetyl)₂-(γGlu)-CO-(CH₂)₁₆-CO₂H)AQ-αMe4Pal-Orn-FIe- | | | |
| | | | αMeY-LIEGSPSSGAPPPSK(PEG₂₄-BEA-MalDap₂-Fc KRQ)-NH₂ | | | |
| 468 | | 924 | Y-Aib-QGT-αMeF(2F)-TSD-4Pal-αMeS-I-αMeL-LD-Orn-K(2-12-(2-amino- | 99 | 339 | 936 |
| | | | ethoxy)-ethoxy]-acetyl)₂-(γGlu)-CO-(CH₂)₁₆-CO₂H)AQ-αMe4Pal-Orn-FIE- | | | |
| | | | αMeY-LIEGGGGGGGSGGGGSGAPAPAPAPAPAPK(BEA-MalDap₂-Fc | | | |
| | | | KRQ)-NH₂ | | | |
| 469 | | 925 | Y-Aib-QGT-αMeF(2F)-TSDY-αMeS-I-αMeL-LD-Orn-K(2-[2-(2-amino- | 100 | 340 | 936 |
| | | | ethoxy)-ethoxy]-acetyl)₂-(γGlu)-CO-(CH₂)₁₆-CO₂H)AQ-αMe4Pal-Orn-FIe- | | | |
| | | | αMeY-LIEGGGGGGGSGGGGSGAPAPAPAPAPAPK(BEA-MalDap₂-Fc | | | |
| | | | KRQ)-NH₂ | | | |
| 470 | | 926 | Y-Aib-QGT-αMeF(2F)-TSDY-αMeS-I-αMeL-LD-Orn-K(2-[2-(2-amino- | 97 | 337 | 936 |
| | | | ethoxy)-ethoxy]-acetyl)₂-(γGlu)-CO-(CH₂)₁₆-CO₂H)AQ-αMe4Pal-Orn-FIe- | | | |
| | | | αMeY-LIEGSPSSGAPPPSK(2-[2-(2-amino-ethoxy)-ethoxy]-acetyl)₆- | | | |
| | | | GPAPAPAPAPAPA-BEA(MalDap₂-Fc KRQ)-NH₂ | | | |
| 471 | | 927 | Y-Aib-QGT-αMeF(2F)-TSDY-αMeS-I-αMeL-LD-Orn-K(2-[2-(2-amino- | 97 | 337 | 941 |
| | | | ethoxy)-ethoxy]-acetyl)₂-(γGlu)-CO-(CH₂)₁₆-CO₂H)AQ-αMe4Pal-Orn-FIe- | | | |
| | | | αMeY-LIEGSPSSGAPPPSK(PEG₂₄-BEA-MalDap₂-Fc IG KRQ)-NH₂ | | | |
| 472 | | 928 | Y-Aib-QGT-αMeF(2F)-TSDY-αMeS-I-αMeL-LD-Orn-K(2-12-(2-amino- | 112 | 364 | 941 |
| | | | ethoxy)-ethoxy]-acetyl)₂-(γGlu)-CO-(CH₂)₁₆-CO₂H)AQ-αMe4Pal-Orn-FIe- | | | |
| | | | αMeY-LIE-Aib-SPSSGAPPPSK(PEG₂₄-BEA-MalDap₂-Fc IG KRQ)-NH₂ | | | |
| 473 | | 929 | Y-Aib-QGT-αMeF(2F)-TSDY-αMeS-I-αMeL-LD-Orn-K(2-12-(2-amino- | 97 | 337 | 941 |
| | | | ethoxy)-ethoxy]-acetyl)₂-(γGlu)-CO-(CH₂)₁₆-CO₂H)AQ-αMe4Pal-Orn-FIe- | | | |
| | | | αMeY-LIEGSPSSGAPPPSK(2-[2-(2-amino-ethoxy)-ethoxy]-acetyl)₆-BEA- | | | |
| | | | MalDap₂-Fc IG KRQ)-NH₂ | | | |
| 474 | | 930 | Y-Aib-QGT-αMeF(2F)-TSDY-αMeS-I-αMeL-LD-Orn-K(2-[2-(2-amino- | 118 | 370 | 941 |
| | | | ethoxy)-ethoxy]-acetyl)₂-(γGlu)-CO-(CH₂)₁₆-CO₂H)AQ-αMe4Pal-Orn-FIe- | | | |
| | | | αMeY-LIE-Aib-GGGGGGSGGGGSGAPAPAPAPAPAPK(BEA-MalDap₂- | | | |
| | | | Fc IG KRQ)-NH₂ | | | |
| 475 | | 931 | Y-Aib-QGT-αMeF(2F)-TSDY-αMeS-I-αMeL-LD-Orn-K(2-[2-(2-amino- | 112 | 364 | 941 |
| | | | ethoxy)-ethoxy]-acetyl)₂-(γGlu)-CO-(CH₂)₁₆-CO₂H)AQ-αMe4Pal-Orn-FIe- | | | |
| | | | αMeY-LIE-Aib-SPSSGAPPPSK(2-[2-(2-amino-ethoxy)-ethoxy]-acetyl)₆- | | | |
| | | | GPAPAPAPAPAPA-BEA(MalDap₂-Fc IG KRQ)-NH₂ | | | |
| 476 | | 932 | Y-Aib-QGT-αMeF(2F)-TSDY-αMeS-I-αMeL-LD-Orn-K(2-[2-(2-amino- | 112 | 364 | 941 |
| | | | ethoxy)-ethoxy]-acetyl)₂-(γGlu)-CO-(CH₂)₁₆-CO₂H)AQ-αMe4Pal-Orn-FIe- | | | |
| | | | αMeY-LIE-Aib-SPSSGAPPPSK(2-[2-(2-amino-ethoxy)-ethoxy]-acetyl)₆- | | | |
| | | | BEA-MalDap₂-Fc IG KRQ)-NH₂ | | | |
| 477 | | 933 | Y-Aib-QGT-αMeF(2F)-TSDY-αMeS-I-αMeL-LD-Orn-K(2-[2-(2-amino- | 112 | 457 | 941 |
| | | | ethoxy)-ethoxy]-acetyl)₂-(γGlu)-CO-(CH₂)₁₆-CO₂H)AQ-αMe4Pal-Orn-FIE- | | | |
| | | | αMeY-LIE-Aib-SPSSGAPPPSK(PEG₂₄-BEA-MalDap₂-Fc IG KRQ)-NH₂ | | | |
| 478 | | 934 | Y-Aib-QGT-αMeF(2F)-TSDY-αMeS-I-αMeL-LD-Orn-K(2-[2-(2-amino- | 186 | 458 | 941 |
| | | | ethoxy)-ethoxy]-acetyl)₂-(γGlu)-CO-(CH₂)₁₆-CO₂H)AQ-αMe4Pal-Orn-FIQ- | | | |
| | | | αMeY-LIE-Aib-SPSSGAPPPSK(PEG₂₄-BEA-MalDap₂-Fc IG KRQ)-NH₂ | | | |
| 479 | 21 | 1099 | Y-Aib-EGT-αMeF(2F)-TSD-4Pal-SI-αMeL-LDEK(2-[2-(2-amino-ethoxy)- | 1 | 187 | 935 |
| | | | ethoxy]-acetyl)₂-(γGlu)-CO-(CH₂)₁₆-CO₂H)AQ-Aib-EFIe-αMeY- | | | |
| | | | LIEGSPSSGAPPPSK(PEG₂₄-dCAP-Fc)-NH₂ | | | |
| 483 | 32 | 1100 | Y-Aib-EGT-αMeF(2F)-TSDY-Aib-I-αMeL-LD-Orn-K(2-[2-(2-amino- | 59 | 264 | 935 |
| | | | ethoxy)-ethoxy]-acetyl)₂-(γGlu)-CO-(CH₂)₁₆-CO₂H)AQ-Aib-EFIE-αMeY- | | | |
| | | | LIEGSPSSGAPPPSK(PEG₂₄-BEA-MSPT2-Fc)-NH₂ | | | |
| 484 | 33 | 1101 | Y-Aib-QGT-αMeF(2F)-TSDY-αMeS-I-αMeL-LD-Orn-K(2-[2-(2-amino- | 128 | 380 | 935 |
| | | | ethoxy)-ethoxy]-acetyl)₂-(γGlu)-CO-(CH₂)₁₆-CO₂H)AQ-αMe4Pal-EFIE- | | | |
| | | | αMeY-LIEGSPSSGAPPPSK(PEG₂₄-BEA-MSPT2-Fc)-NH₂ | | | |
| 485 | 34 | 1102 | Y-Aib-QGT-aMcF(2F)-TSD-4Pal-αMeS-I-αMeL-LD-Orn-K(2-[2-(2-amino- | 130 | 447 | 935 |
| | | | ethoxy)-ethoxy]-acetyl)-(γGlu)-CO-(CH₂)₁₆-CO₂H)AQ-αMe4Pal-EFIE- | | | |
| | | | αMeY-LIEGSPSSGAPPPSK(PEG₂₄-BEA-MSPT2-Fc)-NH₂ | | | |
| 486 | 36 | 1103 | Y-Aib-QGT-αMeF(2F)-TSDY-αMeS-I-αMeL-LD-Orn-K(2-[2-(2-amino- | 113 | 424 | 935 |
| | | | ethoxy)-ethoxy]-acetyl)-(γGlu)-CO-(CH₂)₁₆-CO₂H)AQ-αMe4Pal-EFIe-αMeY- | | | |
| | | | LIEGSPSSGAPPPSK(PEG₂₄-BEA-MSPT2-Fc)-NH₂ | | | |
| 487 | 37 | 1104 | Y-Aib-QGT-αMeF(2F)-TSD-4Pal-αMeS-I-αMeL-LD-Orn-K(2-[2-(2-amino- | 183 | 450 | 935 |
| | | | ethoxy)-ethoxy]-acetyl)-(γGlu)-CO-(CH₂)₁₆-CO₂H)AQ-αMe4Pal-EFIe-αMeY- | | | |
| | | | LIEGSPSSGAPPPSK(PEG₂₄-BEA-MSPT2-Fc)-NH₂ | | | |
| 488 | | 1105 | Y-Aib-EGT-αMeF(2F)-TSD-4Pal-Aib-I-αMeL-LD-Orn-QAQ-Aib-EFIe- | 187 | N/A | 935 |
| | | | αMeY-LIEGGG(GGGGS)₃-K(BEA-MalDap2-Fc)-NH₂ | | | |
| 489 | | 1106 | Y-Aib-EGT-αMeF(2F)-TSD-Y-Aib-I-αMeL-LD-Orn-K(2-12-(2-amino- | 188 | 502 | 935 |
| | | | ethoxy)-ethoxy]-acetyl)₂-(γGlu)-CO-(CH₂)₁₆-CO2H)AQ-Aib-Orn-FIE-αMeY- | | | |
| | | | LIEGSPSSGAPPPSK(PEG₂₄-BEA-MalDap₂-Fc)-NH₂ | | | |
| 490 | | 1107 | Y-Aib-EGT-αMeF(2F)-TSDY-Aib-I-αMeL-LD-Orn-K(2-[2-(2-amino- | 189 | 503 | 935 |
| | | | ethoxy)-ethoxy]-acetyl)₂-(γGlu)-CO-(CH₂)₁₆-CO₂H)AQ-Aib-EFIE-αMeY- | | | |
| | | | LIAGGGK(PEG₂₄-BEA-MSPT2-Fc)-NH₂ | | | |
| 491 | | 1108 | Y-Aib-EGT-αMeF(2F)-TSDY-Aib-I-αMeL-LD-Orn-K(2-[2-(2-amino- | 190 | 504 | 935 |
| | | | ethoxy)-ethoxy]-acetyl)₂-(γGlu)-CO-(CH₂)₁₆-CO₂H)AQ-Aib-EFIE-αMeY- | | | |
| | | | LIE-Aib-GGK(PEG₂₄-BEA-MSPT2-Fc)-NH₂ | | | |
| 492 | | 1109 | Y-Aib-EGT-αMeF(2F)-TSDY-Aib-I-αMeL-LD-Orn-K(2-[2-(2-amino- | 59 | 505 | 935 |
| | | | ethoxy)-ethoxy]-acetyl)₂-(γGlu)-CO-(CH₂)₁₄-CO₂H)AQ-Aib-EFIE-αMeY- | | | |
| | | | LIEGSPSSGAPPPSK(PEG₂₄-BEA-MalDap₂-Fc)-NH₂ | | | |
| 493 | 39 | 1110 | Y-Aib-EGT-αMeF(2F)-TSDY-Aib-I-αMeL-LD-Orn-K(2-[2-(2-amino- | 59 | 307 | 935 |
| | | | ethoxy)-ethoxy]-acetyl)₂-(γGlu)-CO-(CH₂)₁₆-CO₂H)AQ-Aib-EFIE-αMeY- | | | |
| | | | LIEGSPSSGAPPPSK(PEG₂₄-BEA-B-MalDap₂-Fc)-NH₂ | | | |
| 494 | | 1111 | Y-Aib-QGT-αMeF(2F)-TSDY-αMeS-I-αMeL-LD-Orn-K(2-[2-(2-amino- | 191 | 506 | 935 |
| | | | ethoxy)-ethoxy]-acetyl)₂-(γGlu)-CO-(CH₂)₁₆-CO₂H)AQ-αMe4Pal-Orn-FIE- | | | |
| | | | αMeY-LVEGSPSSGAPPPSK(PEG₂₄-BEA-MalDap₂-Fc)-NH₂ | | | |
| 495 | | 1112 | Y-Aib-QGT-αMeF(2F)-TSD-4Pal-αMeS-I-αMeL-LD-Orn-K(2-[2-(2-amino- | 96 | 507 | 935 |
| | | | ethoxy)-ethoxy]-acetyl)-(γGlu)-CO-(CH₂)₁₆-CO₂H)AQ-αMe4Pal-Orn-FIE- | | | |
| | | | αMeY-LIEGSPSSGAPPPSK(PEG₂₄-BEA-MalDap₂-Fc)-NH₂ | | | |
| 496 | | 1113 | Y-Aib-QGT-αMeF(2F)-TSD-4Pal-αMeS-I-αMeL-LD-Orn-K(2-[2-(2-amino- | 192 | 508 | 935 |
| | | | ethoxy)-ethoxy]-acetyl)-(γGlu)-CO-(CH₂)₁₆-CO₂H)AQ-αMe4Pal-Orn-FIE- | | | |
| | | | αMeY-LVEGSPSSGAPPPSK(PEG₂₄-BEA-MalDap₂-Fc)-NH₂ | | | |
| 497 | | 1114 | Y-Aib-QGT-αMeF(2F)-TSDY-αMeS-I-αMeL-LD-Orn-K(2-12-(2-amino- | 191 | 509 | 935 |
| | | | ethoxy)-ethoxy]-acetyl)-(γGlu)-CO-(CH₂)₁₆-CO₂H)AQ-αMe4Pal-Orn-FIE- | | | |
| | | | αMeY-LVEGSPSSGAPPPSK(PEG₂₄-BEA-MalDap₂-Fc)-NH₂ | | | |
| 498 | | 1115 | Y-Aib-QGT-αMeF(2F)-TSDY-αMeS-I-αMeL-LD-Orn-K(2-12-(2-amino- | 98 | 468 | 935 |
| | | | ethoxy)-ethoxy]-acetyl)-(γGlu)-CO-(CH₂)₁₆-CO₂H)AQ-αMe4Pal-Orn-FIE- | | | |
| | | | αMeY-LIEGSPSSGAPPPSGK(PEG₂₄-BEA-MalDap₂-Fc)-NH₂ | | | |
| 499 | | 1116 | Y-Aib-QGT-αMeF(2F)-TSDY-αMeS-I-αMeL-LD-Orn-K(2-12-(2-amino- | 128 | 438 | 935 |
| | | | ethoxy)-ethoxy]-acetyl)-(γGlu)-CO-(CH₂)₁₆-CO₂H)AQ-αMe4Pal-EFIE- | | | |
| | | | αMeY-LIEGSPSSGAPPPSGK(PEG₂₄-BEA-MalDap₂-Fc)-NH₂ | | | |
| 500 | | 1117 | Y-Aib-QGT-αMeF(2F)-TSD-4Pal-SI-αMeL-LD-Orn-K(ϵKϵK-(γGlu)-CO- | 94 | 510 | 935 |
| | | | (CH₂)₁₆-CO₂H)AQ-αMe4Pal-Orn-FIE-αMeY-LIEGSPSSGAPPPSK(PEG₂₄- | | | |
| | | | BEA-MalDap₂-Fc)-NH₂ | | | |
| 501 | | 1118 | Y-Aib-QGT-αMeF(2F)-TSDY-αMeS-I-αMeL-LD-Orn-K(ϵKϵK-(γGlu)-CO- | 98 | 511 | 935 |
| | | | (CH₂)₁₆-CO₂H)AQ-αMe4Pal-Orn-FIE-αMeY-LIEGSPSSGAPPPSK(PEG₂₄- | | | |
| | | | BEA-MalDap₂-Fc)-NH₂ | | | |
| 502 | | 1119 | Y-Aib-QGT-αMeF(2F)-TSD-4Pal-αMeS-I-αMeL-LD-Orn-K(ϵKϵK-(γGlu)- | 130 | 512 | 935 |
| | | | CO-(CH₂)₁₆-CO₂H)AQ-αMe4Pal-EFIE-αMeY-LIEGSPSSGAPPPSK(PEG₂₄- | | | |
| | | | BEA-MalDap₂-Fc)-NH₂ | | | |
| 503 | | 1120 | Y-Aib-QGT-αMeF(2F)-TSDY-αMeS-I-αMeL-LD-Orn-K(&K&K-(γGlu)-CO- | 128 | 513 | 935 |
| | | | (CH₂)₁₆-CO₂H)AQ-αMe4Pal-EFIE-αMeY-LIEGSPSSGAPPPSK(PEG₂₄- | | | |
| | | | BEA-MalDap₂-Fc)-NH₂ | | | |
| 504 | | 1121 | Y-Aib-QGT-αMeF(2F)-TSDY-αMeS-I-αMeL-LD-Orn-K(2-[2-(2-amino- | 193 | 514 | 935 |
| | | | ethoxy)-ethoxy]-acetyl)-(γGlu)-CO-(CH₂)₁₆-CO₂H)AQ-αMe4Pal-EFIE- | | | |
| | | | αMeY-LVEGSPSSGAPPPSK(PEG₂₄-BEA-MalDap₂-Fc)-NH₂ | | | |
| 505 | | 1122 | YaQGT-aMcF(2F)-TSD-4Pal-αMeS-I-αMeL-LD-Orn-K(2-[2-(2-amino- | 194 | 515 | 935 |
| | | | ethoxy)-ethoxy]-acetyl)-(γGlu)-CO-(CH₂)₁₆-CO₂H)AQ-αMe4Pal-Orn-FIE- | | | |
| | | | αMeY-LIEGSPSSGAPPPSK(PEG₂₄-BEA-MalDap₂-Fc)-NH₂ | | | |
| 506 | | 1123 | YaQGT-aMcF(2F)-TSD-4Pal-SI-αMeL-LD-Orn-K(2-[2-(2-amino-ethoxy)- | 195 | 516 | 935 |
| | | | ethoxy]-acetyl)-(γGlu)-CO-(CH₂)₁₆-CO₂H)AQ-αMe4Pal-Orn-FIE-αMeY- | | | |
| | | | LIEGSPSSGAPPPSK(PEG₂₄-BEA-MalDap₂-Fc)-NH₂ | | | |
| 507 | | 1124 | YaQGT-αMeF(2F)-TSDY-αMeS-I-αMeL-LD-Orn-K(2-[2-(2-amino-ethoxy)- | 196 | 517 | 935 |
| | | | ethoxy]-acetyl)-(γGlu)-CO-(CH₂)₁₆-CO₂H)AQ-αMe4Pal-Orn-FIE-αMeY- | | | |
| | | | LIEQSPSSGAPPPSK(PEG₂₄-BEA-MalDap₂-Fc)-NH₂ | | | |
| 508 | | 1125 | Y-αMeS-QGT-αMeF(2F)-TSDY-αMeS-I-αMeL-LD-Orn-K(2-[2-(2-amino- | 197 | 518 | 935 |
| | | | ethoxy)-ethoxy]-acetyl)-(γGlu)-CO-(CH₂)₁₆-CO₂H)AQ-αMe4Pal-Orn-FIE- | | | |
| | | | αMeY-LIEGSPSSGAPPPSK(PEG₂₄-BEA-MalDap₂-Fc)-NH₂ | | | |
| 509 | | 1126 | Y-αMeS-QGT-αMeF(2F)-TSD-4Pal-αMeS-I-αMeL-LD-Orn-K(2-[2-(2- | 198 | 519 | 935 |
| | | | amino-ethoxy)-ethoxy]-acetyl)-(γGlu)-CO-(CH₂)₆-CO₂H)AQ-αMe4Pal-Orn- | | | |
| | | | FIE-αMeY-LIEGSPSSGAPPPSK(PEG₂₄-BEA-MalDap₂-Fc)-NH₂ | | | |
| 510 | | 1127 | Y-αMeS-QGT-αMeF(2F)-TSDY-αMeS-I-αMeL-LD-Orn-K(2-[2-(2-amino- | 197 | 520 | 935 |
| | | | ethoxy)-ethoxy]-acetyl)₂-(γGlu)-CO-(CH₂)₁₆-CO₂H)AQ-αMe4Pal-Orn-FIE- | | | |
| | | | αMeY-LIEGSPSSGAPPPSK(PEG₂₄-BEA-MalDap₂-Fc)-NH₂ | | | |
| 511 | | 1128 | Y-Iva-QGT-αMeF(2F)-TSDY-αMeS-I-αMeL-LD-Orn-K(2-[2-(2-amino- | 199 | 521 | 935 |
| | | | ethoxy)-ethoxy]-acetyl)-(γGlu)-CO-(CH₂)₁₆-CO₂H)AQ-αMe4Pal-Orn-FIE- | | | |
| | | | αMeY-LIEGSPSSGAPPPSK(PEG₂₄-BEA-MalDap₂-Fc)-NH₂ | | | |
| 512 | | 1129 | Y-Iva-QGT-αMeF(2F)-TSD-4Pal-αMeS-I-αMeL-LD-Orn-K(2-[2-(2-amino- | 200 | 522 | 935 |
| | | | ethoxy)-ethoxy]-acetyl)-(γGlu)-CO-(CH₂)₁₆-CO₂H)AQ-αMe4Pal-Orn-FIE- | | | |
| | | | αMeY-LIEGSPSSGAPPPSK(PEG₂₄-BEA-MalDap₂-Fc)-NH₂ | | | |
| 513 | | 1130 | Y-Iva-QGT-αMeF(2F)-TSDY-αMeS-I-αMeL-LD-Orn-K(2-[2-(2-amino- | 199 | 523 | 935 |
| | | | ethoxy)-ethoxy]-acetyl)₂-(γGlu)-CO-(CH₂)₁₆-CO₂H)AQ-αMe4Pal-Orn-FIE- | | | |
| | | | αMeY-LIEGSPSSGAPPPSK(PEG₂₄-BEA-MalDap₂-Fc)-NH₂ | | | |
| 514 | | 1131 | Y-Ac4c-QGT-αMeF(2F)-TSD-4Pal-αMeS-I-αMeL-LD-Orn-K(2-[2-(2-amino- | 201 | 524 | 935 |
| | | | ethoxy)-ethoxy]-acetyl)-(γGlu)-CO-(CH2)₁₆-CO₂H)AQ-αMe4Pal-EFIE- | | | |
| | | | αMeY-LIEGSPSSGAPPPSK(PEG₂₄-BEA-MalDap₂-Fc)-NH₂ | | | |
| 515 | | 1132 | Y-Ac4c-QGT-αMeF(2F)-TSDY-αMeS-I-αMeL-LD-Orn-K(2-[2-(2-amino- | 152 | 525 | 935 |
| | | | ethoxy)-ethoxy]-acetyl)₂-(γGlu)-CO-(CH2)₁₆-CO₂H)AQ-αMe4Pal-EFIE- | | | |
| | | | αMeY-LIEGSPSSGAPPPSK(PEG₂₄-BEA-MalDap₂-Fc)-NH₂ | | | |
| 516 | | 1133 | Y-Aib-QGT-αMeF(2F)-TSDY-αMeS-I-αMeL-LD-Orn-K(2-[2-(2-amino- | 128 | 395 | 935 |
| | | | ethoxy)-ethoxy]-acetyl)-(γGlu)-CO-(CH₂)₁₆-CO₂H)AQ-αMe4Pal-EFIE- | | | |
| | | | αMeY-LIEGSPSSGAPPPSGK(PEG₂₄-BEA-MalDap₂-Fc)-NH₂ | | | |
| 517 | | 1134 | Y-Aib-QGT-αMeF(2F)-TSDY-αMeS-I-αMeL-LD-Orn-K(ϵKϵK-(γGlu)-CO- | 113 | 526 | 935 |
| | | | (CH₂)₁₆-CO₂H)AQ-αMe4Pal-EFIe-αMeY-LIEGSPSSGAPPPSK(PEG₂₄-BEA- | | | |
| | | | MalDap₂-Fc)-NH₂ | | | |
| 518 | | 1135 | Y-Aib-QGT-αMeF(2F)-TSDY-αMeS-I-αMeL-LD-Orn-K(2-12-(2-amino- | 202 | 527 | 935 |
| | | | ethoxy)-ethoxy]-acetyl)-(γGlu)-CO-(CH₂)₁₆-CO₂H)AQ-αMeL-Orn-FIe- | | | |
| | | | αMeY-LIEGSPSSGAPPPS-K(PEG₂₄-BEA-MalDap₂-Fc)-NH₂ | | | |
| 519 | | 1136 | Y-Aib-QGT-αMeF(2F)-TSDY-αMeS-I-αMeL-LD-Orn-K(2-[2-(2-amino- | 203 | 528 | 935 |
| | | | ethoxy)-ethoxy]-acetyl)-(γGlu)-CO-(CH₂)₁₆-CO₂H)AQ-αMeL-Iva-FIe-αMeY- | | | |
| | | | LIEGSPSSGAPPPS-K(PEG₂₄-BEA-MalDap₂-Fc)-NH₂ | | | |
| 520 | | 1137 | Y-Aib-QGT-αMeF(2F)-TSD-4Pal-αMeS-I-αMeL-LD-Orn-K(2-12-(2-amino- | 204 | 529 | 935 |
| | | | ethoxy)-ethoxy]-acetyl)-(γGlu)-CO-(CH₂)₁₆-CO₂H)AQ-αMeL-Orn-FIe- | | | |
| | | | αMeY-LIEGSPSSGAPPPS-K(PEG₂₄-BEA-MalDap₂-Fc)-NH₂ | | | |
| 521 | | 1138 | Y-Aib-QGT-αMeF(2F)-TSD-4Pal-αMeS-I-αMeL-LD-Orn-K(2-12-(2-amino- | 205 | 530 | 935 |
| | | | ethoxy)-ethoxy]-acetyl)-(γGlu)-CO-(CH₂)₁₆-CO₂H)AQ-αMeL-Iva-FIe-αMeY- | | | |
| | | | LIEGSPSSGAPPPS-K(PEG₂₄-BEA-MalDap₂-Fc)-NH2 | | | |
| 522 | | 1139 | Y-Aib-QGT-αMeF(2F)-TSDY-αMeS-I-αMeL-LD-Orn-K(2-12-(2-amino- | 206 | 531 | 935 |
| | | | ethoxy)-ethoxy]-acetyl)₂-(γGlu)-CO-(CH₂)₁₆-CO₂H)AQ-αMe4Pal-EFIE- | | | |
| | | | αMeY-LIAGSPSSGAPPPSK(PEG₂₄-BEA-MalDap₂-Fc)-NH₂ | | | |
| 523 | | 1140 | Y-Aib-QGT-αMeF(2F)-TSDY-αMeS-I-αMeL-LD-Orn-K(2-12-(2-amino- | 206 | 532 | 935 |
| | | | ethoxy)-ethoxy]-acetyl)-(γGlu)-CO-(CH₂)₁₆-CO₂H)AQ-αMe4Pal-EFIE- | | | |
| | | | αMeY-LIAGSPSSGAPPPSK(PEG₂₄-BEA-MalDap₂-Fc)-NH₂ | | | |
| 524 | | 1141 | Y-Aib-QGT-αMeF(2F)-TSDY-αMeS-I-αMeL-LD-Orn-K(2-[2-(2-amino- | 207 | 533 | 935 |
| | | | ethoxy)-ethoxy]-acetyl)₂-(γGlu)-CO-(CH₂)₁₆-CO₂H)AQ-αMe4Pal-EFIE- | | | |
| | | | αMeY-LIEaSPSSGAPPPSK(PEG₂₄-BEA-MalDap₂-Fc)-NH₂ | | | |
| 525 | | 1142 | Y-Aib-QGT-αMeF(2F)-TSDY-αMeS-I-αMeL-LD-Orn-K(2-12-(2-amino- | 208 | 534 | 935 |
| | | | ethoxy)-ethoxy]-acetyl)-(γGlu)-CO-(CH₂)₁₆-CO₂H)AQ-αMe4Pal-EFIe-αMeY- | | | |
| | | | LIAGSPSSGAPPPSK(PEG₂₄-BEA-MalDap₂-Fc)-NH₂ | | | |
| 526 | | 1143 | YaQGT-αMeF(2F)-TSDY-αMeS-I-αMeL-LD-Orn-K(2-[2-(2-amino-ethoxy)- | 209 | 535 | 935 |
| | | | ethoxy]-acetyl)2-(γGlu)-CO-(CH₂)₁₆-CO₂H)AQ-αMe4Pal-Orn-FIE-αMeY- | | | |
| | | | LIAGSPSSGAPPPSK(PEG₂₄-BEA-MalDap₂-Fc)-NH₂ | | | |
| 527 | | 1144 | Y-Aib-QGT-αMeF(2F)-TSDY-αMeS-I-αMeL-LD-Orn-K(2-[2-(2-amino- | 210 | 536 | 935 |
| | | | ethoxy)-ethoxy]-acetyl)-(γGlu)-CO-(CH₂)₁₆-CO₂H)AQ-Aib-Orn-FIe-αMeY- | | | |
| | | | LIAGSPSSGAPPPSK(PEG₂₄-BEA-MalDap₂-Fc)-NH₂ | | | |
| 528 | | 1145 | YaQGT-αMeF(2F)-TSDY-αMeS-I-αMeL-LD-Orn-K(2-[2-(2-amino-ethoxy)- | 211 | 537 | 935 |
| | | | ethoxy]-acetyl)₂-(γGlu)-CO-(CH₂)₁₆-CO₂H)AQ-αMe4Pal-Orn-FIE-αMeY- | | | |
| | | | LIEaSPSSGAPPPSK(PEG₂₄-BEA-MalDap₂-Fc)-NH₂ | | | |
| 529 | | 1146 | Y-Aib-QGT-αMeF(2F)-TSDY-αMeS-I-αMeL-LD-Orn-K(2-12-(2-amino- | 212 | 538 | 935 |
| | | | ethoxy)-ethoxy]-acetyl)₂-(γGlu)-CO-(CH2)₁₆-CO₂H)AQ-αMe4Pal-SFIE- | | | |
| | | | αMeY-LIEGSPSSGAPPPSK(PEG₂₄-BEA-MalDap₂-Fc)-NH₂ | | | |
| 530 | | 1147 | Y-Aib-QGT-αMeF(2F)-TSDY-αMeS-I-αMeL-LD-Orn-K(2-12-(2-amino- | 213 | 539 | 935 |
| | | | ethoxy)-ethoxy]-acetyl)₂-(γGlu)-CO-(CH₂)₁₆-CO₂H)AQ-Aib-SFIE-αMeY- | | | |
| | | | LIEGSPSSGAPPPSK(PEG₂₄-BEA-MalDap₂-Fc)-NH₂ | | | |
| 531 | | 1148 | Y-Aib-QGT-αMeF(2F)-TSDY-αMeS-I-αMeL-LD-Orn-K(2-[2-(2-amino- | 214 | 540 | 935 |
| | | | ethoxy)-ethoxy]-acetyl)₂-(γGlu)-CO-(CH2)₁₆-CO₂H)AQ-4Pal-AFIE-αMeY- | | | |
| | | | LIEGSPSSGAPPPSK(PEG₂₄-BEA-MalDap₂-Fc)-NH₂ | | | |
| 532 | | 1149 | Y-Aib-QGT-αMeF(2F)-TSDY-αMeS-I-αMeL-LD-Orn-K(2-12-(2-amino- | 215 | 541 | 935 |
| | | | ethoxy)-ethoxy]-acetyl)-(γGlu)-CO-(CH2)₁₆-CO₂H)AQ-αMeF-Aib-FIe-αMeY- | | | |
| | | | LIEGSPSSGAPPPSK(PEG₂₄-BEA-MalDap₂-Fc)-NH₂ | | | |
| 533 | | 1150 | Y-Aib-QGT-αMeF(2F)-TSDY-αMeS-I-αMeL-LD-Orn-K(2-12-(2-amino- | 216 | 542 | 935 |
| | | | ethoxy)-ethoxy]-acetyl)-(γGlu)-CO-(CH₂)₁₆-CO₂H)AQ-Iva-AFIe-αMeY- | | | |
| | | | LIEGSPSSGAPPPS-K(PEG₂₄-BEA-MalDap₂-Fc)-NH₂ | | | |
| 534 | | 1151 | Y-Aib-QGT-αMeF(2F)-TSDY-αMeS-I-αMeL-LD-Orn-K(2-[2-(2-amino- | 217 | 543 | 935 |
| | | | ethoxy)-ethoxy]-acetyl)₂-(γGlu)-CO-(CH₂)₁₆-CO₂H)AQ-Aib-EFIE-αMeY- | | | |
| | | | LIEGSPSSGAPPPSK(PEG₂₄-BEA-MalDap₂-Fc)-NH₂ | | | |
| 535 | | 1152 | Y-Aib-QGT-αMeF(2F)-TSDY-αMeS-I-αMeL-LD-Orn-K(2-12-(2-amino- | 218 | 544 | 935 |
| | | | ethoxy)-ethoxy]-acetyl)-(γGlu)-CO-(CH₂)₁₆-CO₂H)AQ-αMe4Pal-EFIe-αMeY- | | | |
| | | | LIE-Aib-SPSSGAPPPSK(PEG₂₄-BEA-MalDap₂-Fc)-NH₂ | | | |
| 536 | | 1153 | Y-Aib-QGT-αMeF(2F)-TSDY-αMeS-I-αMeL-LD-Orn-K(2-[2-(2-amino- | 219 | 545 | 935 |
| | | | ethoxy)-ethoxy]-acetyl)-(γGlu)-CO-(CH₂)₁₆-CO₂H)AQ-αMeL-Orn-FIe- | | | |
| | | | αMeY-LIAaSPSSGAPPPS-K(PEG₂₄-BEA-MalDap₂-Fc)-NH₂ | | | |
| 537 | | 1154 | Y-Aib-QGT-αMeF(2F)-TSDY-αMeS-I-αMeL-LD-Orn-K(2-12-(2-amino- | 128 | 438 | 935 |
| | | | ethoxy)-ethoxy]-acetyl)-(γGlu)-CO-(CH₂)₁₆-CO₂H)AQ-αMe4Pal-EFIE- | | | |
| | | | αMeY-LIEGSPSSGAPPPSK(PEG₂₄-BEA-MSPT2-Fc)-NH₂ | | | |
| 538 | | 1155 | Y-Aib-QGT-αMeF(2F)-TSD-4Pal-αMeS-I-αMeL-LD-Orn-K(2-12-(2-amino- | 133 | 546 | 935 |
| | | | ethoxy)-ethoxy]-acetyl)-(γGlu)-CO-(CH₂)₁₆-CO₂H)AQ-αMe4Pal-EFIE- | | | |
| | | | αMeY-LIE-Aib-SPSSGAPPPSK(PEG₂₄-BEA-MSPT2-Fc)-NH₂ | | | |
| 539 | | 1156 | Y-Aib-QGT-αMeF(2F)-TSD-4Pal-αMeS-I-αMeL-LD-Orn-K(2-[2-(2-amino- | 220 | 547 | 935 |
| | | | ethoxy)-ethoxy]-acetyl)-(γGlu)-CO-(CH₂)₁₆-CO₂H)AQ-αMe4Pal-EFIE- | | | |
| | | | αMeY-LIAGSPSSGAPPPSK(PEG₂₄-BEA-MSPT2-Fc)-NH₂ | | | |
| 540 | | 1157 | Y-Aib-QGT-αMeF(2F)-TSD-4Pal-αMeS-I-αMeL-LD-Orn-K(2-[2-(2-amino- | 221 | 548 | 935 |
| | | | ethoxy)-ethoxy]-acetyl)-(γGlu)-CO-(CH₂)₁₆-CO₂H)AQ-αMe4Pal-EFIE- | | | |
| | | | αMeY-LIAaSPSSGAPPPSK(PEG₂₄-BEA-MSPT2-Fc)-NH₂ | | | |
| 541 | | 1158 | Y-Aib-QGT-αMeF(2F)-TSD-4Pal-αMeS-I-αMeL-LD-Orn-K(2-[2-(2-amino- | 222 | 549 | 935 |
| | | | ethoxy)-ethoxy]-acetyl)-(γGlu)-CO-(CH₂)₁₆-CO₂H)AQ-αMeL-Iva-FIe-αMeY- | | | |
| | | | LIA-Aib-SPSSGAPPPS-K(PEG₂₄-BEA-MSPT2-Fc)-NH₂ | | | |
| 542 | | 1159 | Y-Aib-QGT-αMeF(2F)-TSD-4Pal-αMeS-I-αMeL-LD-Orn-K(2-12-(2-amino- | 223 | 550 | 935 |
| | | | ethoxy)-ethoxy]-acetyl)₂-(γGlu)-CO-(CH2)₁₆-CO₂H)AQ-αMe4Pal-SFIE- | | | |
| | | | αMeY-LIEGSPSSGAPPPSK(PEG₂₄-BEA-MSPT2-Fc)-NH₂ | | | |
| 543 | | 1160 | Y-Aib-QGT-αMeF(2F)-TSD-4Pal-αMeS-I-αMeL-LD-Orn-K(2-[2-(2-amino- | 224 | 551 | 935 |
| | | | ethoxy)-ethoxy]-acetyl)₂-(γGlu)-CO-(CH₂)₁₆-CO₂H)AQ-αMe4Pal-SFIE- | | | |
| | | | αMeY-LIE-Aib-SPSSGAPPPSK(PEG₂₄-BEA-MSPT2-Fc)-NH₂ | | | |
| 544 | | 1161 | Y-Aib-QGT-αMeF(2F)-TSDY-αMeS-I-αMeL-LD-Orn-K(2-[2-(2-amino- | 225 | 552 | 935 |
| | | | ethoxy)-ethoxy]-acetyl)₂-(γGlu)-CO-(CH₂)₁₆-CO₂H)AQ-αMe4Pal-EFIE- | | | |
| | | | αMeY-LIEGGGK(PEG₂₄-BEA-MSPT2-Fc)-NH₂ | | | |
| 545 | | 1162 | Y-Aib-QGT-αMeF(2F)-TSDY-αMeS-I-αMeL-LD-Orn-K(2-[2-(2-amino- | 226 | 553 | 935 |
| | | | ethoxy)-ethoxy]-acetyl)₂-(γGlu)-CO-(CH₂)₁₆-CO₂H)AQ-αMe4Pal-EFIE- | | | |
| | | | αMeY-LIAGGGK(PEG₂₄-BEA-MSPT2-Fc)-NH₂ | | | |
| 546 | | 1163 | Y-Aib-QGT-αMeF(2F)-TSDY-αMeS-I-αMeL-LD-Orn-K(2-12-(2-amino- | 225 | 554 | 935 |
| | | | ethoxy)-ethoxy]-acetyl)-(γGlu)-CO-(CH₂)₁₆-CO₂H)AQ-αMe4Pal-EFIE- | | | |
| | | | αMeY-LIEGGGK(PEG₂₄-BEA-MSPT2-Fc)-NH₂ | | | |
| 547 | | 1164 | Y-Aib-QGT-αMeF(2F)-TSDY-αMeS-I-αMeL-LD-Orn-K(2-[2-(2-amino- | 227 | 555 | 935 |
| | | | ethoxy)-ethoxy]-acetyl)-(γGlu)-CO-(CH₂)₁₆-CO₂H)AQ-αMe4Pal-EFIe-αMeY- | | | |
| | | | LIEGGGK(PEG₂₄-BEA-MSPT2-Fc)-NH₂ | | | |
| 548 | | 1165 | Y-Ac4c-QGT-αMeF(2F)-TSDY-αMeS-I-αMeL-LD-Orn-K(2-[2-(2-amino- | 228 | 556 | 935 |
| | | | ethoxy)-ethoxy]-acetyl)-(γGlu)-CO-(CH₂)₁₆-CO₂H)AQ-αMe4Pal-EFIE- | | | |
| | | | αMeY-LIEGGGK(PEG₂₄-BEA-MSPT2-Fc)-NH₂ | | | |
| 549 | | 1166 | Y-Aib-QGT-αMeF(2F)-TSD-4Pal-αMeS-I-αMeL-LD-Orn-K(2-[2-(2-amino- | 229 | 557 | 935 |
| | | | ethoxy)-ethoxy]-acetyl)-(γGlu)-CO-(CH₂)₁₆-CO₂H)AQ-αMe4Pal-EFIE- | | | |
| | | | αMeY-LIEGGGK(PEG₂₄-BEA-MSPT2-Fc)-NH₂ | | | |
| 550 | | 1167 | Y-Aib-QGT-αMeF(2F)-TSDY-αMeS-I-αMeL-LD-Orn-K(2-[2-(2-amino- | 128 | 558 | 935 |
| | | | ethoxy)-ethoxy]-acetyl)₂-(γGlu)-CO-(CH₂)₁₄-CO₂H)AQ-αMe4Pal-EFIE- | | | |
| | | | αMeY-LIEGSPSSGAPPPSK(PEG₂₄-BEA-MalDap₂-Fc)-NH₂ | | | |
| 551 | | 1168 | Y-Aib-QGT-αMeF(2F)-TSD-4Pal-αMeS-I-αMeL-LD-Orn-K(2-[2-(2-amino- | 130 | 559 | 935 |
| | | | ethoxy)-ethoxy]-acetyl)-(γGlu)-CO-(CH2)₁₄-CO₂H)AQ-αMe4Pal-EFIE- | | | |
| | | | αMeY-LIEGSPSSGAPPPSK(PEG₂₄-BEA-MalDap₂-Fc)-NH₂ | | | |
| 552 | | 1169 | Y-Aib-QGT-αMeF(2F)-TSDY-αMeS-I-αMeL-LD-Orn-K(2-12-(2-amino- | 128 | 560 | 935 |
| | | | ethoxy)-ethoxy]-acetyl)-(γGlu)-CO-(CH₂)₁₄-CO₂H)AQ-αMe4Pal-EFIE- | | | |
| | | | αMeY-LIEGSPSSGAPPPSK(PEG₂₄-BEA-MalDap₂-Fc)-NH₂ | | | |
| 553 | | 1170 | Y-Aib-QGT-αMeF(2F)-TSD-4Pal-αMeS-I-αMeL-LD-Orn-K(2-[2-(2-amino- | 183 | 561 | 935 |
| | | | ethoxy)-ethoxy]-acetyl)-(γGlu)-CO-(CH₂)₁₄-CO₂H)AQ-αMe4Pal-EFIe-αMeY- | | | |
| | | | LIEGSPSSGAPPPSK(PEG₂₄-BEA-MSPT2-Fc)-NH₂ | | | |
| 554 | | 1171 | Y-Aib-QGT-αMeF(2F)-TSDY-αMeS-I-αMeL-LD-Orn-K(2-[2-(2-amino- | 128 | 423 | 935 |
| | | | ethoxy)-ethoxy]-acetyl)₂-(γGlu)-CO-(CH₂)₁₆-CO₂H)AQ-αMe4Pal-EFIE- | | | |
| | | | αMeY-LIEGSPSSGAPPPSK(PEG₂₄-BEA-Acetyl2-Fc)-NH₂ | | | |
| 555 | 40 | 1172 | Y-Aib-QGT-αMeF(2F)-TSDY-αMeS-I-αMeL-LD-Orn-K(2-12-(2-amino- | 128 | 423 | 935 |
| | | | ethoxy)-ethoxy]-acetyl)₂-(γGlu)-CO-(CH₂)₁₆-CO₂H)AQ-αMe4Pal-EFIE- | | | |
| | | | αMeY-LIEGSPSSGAPPPSK(PEG₂₄-BEA-B-MalDap₂-Fc)-NH₂ | | | |
| 556 | 41 | 1173 | Y-Aib-QGT-aMcF(2F)-TSD-4Pal-αMeS-I-αMeL-LD-Orn-K(2-[2-(2-amino- | 130 | 490 | 935 |
| | | | ethoxy)-ethoxy]-acetyl)-(γGlu)-CO-(CH₂)₁₆-CO₂H)AQ-αMe4Pal-EFIE- | | | |
| | | | αMeY-LIEGSPSSGAPPPSK(PEG₂₄-BEA-B-MalDap₂-Fc)-NH₂ | | | |
| 557 | 42 | 1174 | Y-Aib-QGT-aMcF(2F)-TSDY-αMeS-I-αMeL-LD-Orn-K(2-12-(2-amino- | 113 | 467 | 935 |
| | | | ethoxy)-ethoxy]-acetyl)-(γGlu)-CO-(CH₂)₁₆-CO₂H)AQ-αMe4Pal-EFIe-αMeY- | | | |
| | | | LIEGSPSSGAPPPSK(PEG₂₄-BEA-B-MalDap₂-Fc)-NH2 | | | |
| 558 | 43 | 1175 | Y-Aib-QGT-aMcF(2F)-TSD-4Pal-αMeS-I-αMeL-LD-Orn-K(2-[2-(2-amino- | 183 | 493 | 935 |
| | | | ethoxy)-ethoxy]-acetyl)-(γGlu)-CO-(CH₂)₁₆-CO₂H)AQ-αMe4Pal-EFIe-αMeY- | | | |
| | | | LIEGSPSSGAPPPSK(PEG₂₄-BEA-B-MalDap₂-Fc)-NH₂ | | | |
| 559 | | 1176 | Y-Aib-QGT-αMeF(2F)-TSD-4Pal-αMeS-I-αMeL-LD-Orn-K(2-[2-(2-amino- | 220 | 547 | 935 |
| | | | ethoxy)-ethoxy]-acetyl)-(γGlu)-CO-(CH₂)₁₆-CO₂H)AQ-αMe4Pal-EFIE- | | | |
| | | | αMeY-LIAGSPSSGAPPPSK(PEG₂₄-BEA-MalDap₂-Fc)-NH₂ | | | |
| 560 | | 1177 | Y-Aib-QGT-αMeF(2F)-TSD-4Pal-αMeS-I-αMeL-LD-Orn-K(2-[2-(2-amino- | 220 | 547 | 935 |
| | | | ethoxy)-ethoxy]-acetyl)-(γGlu)-CO-(CH₂)₁₆-CO₂H)AQ-αMe4Pal-EFIE- | | | |
| | | | αMeY-LIAGSPSSGAPPPSK(PEG₂₄-BEA-B-MalDap₂-Fc)-NH₂ | | | |

[0551] As indicated in Table 3 above, the molecular structure of certain exemplary compounds are provided in FIGS. 1-43.

### In Vitro Functional Activity

[0552] Functional activity is determined in GIP-R, GLP-1R, and GcgR-expressing HEK-293 clonal cell lines. Each receptor cell line is treated with example compounds (20 point concentration response curves with 2.75-fold serial dilutions prepared with a Labcyte Echo Acoustic Liquid Handler) in DMEM (Gibco Cat #31053) supplemented with 1×GlutaMAX™ (L-alanyl-L-glutamine dipeptide, Gibco Cat #35050), 0.1% Casein (Sigma Cat #C4765), 1% HSA (Human Serum Albumin, Sigma Cat #A3782) 500 μM IBMX (3-isobutyl-1-methylxanthine) and 20 mM HEPES (4-(2-hydroxyethyl)-1-piperazineethanesulfonic acid) in a 20 μl assay volume.

[0553] After a 30-minute incubation at 37° C., the resulting increase in intracellular cAMP is quantitatively determined using the CisBio cAMP Dynamic 2 HTRF Assay Kit (62AM4PEJ). Briefly, cAMP levels within the cell are detected by adding the cAMP-d2 conjugate in cell lysis buffer followed by the antibody anti-cAMP-Eu3+-Cryptate, also in cell lysis buffer. The resulting competitive assay is incubated for at least 60 minutes at room temperature and then detected using a Pherastar Instrument (BMG Labtech) with excitation at 320 nm and emission at 665 nm and 620 nm. Raw data values (emission at 665 nm/620 nm*10,000) are inversely proportional to the amount of cAMP present and were converted to cAMP (nM) per well using a cAMP standard curve.

[0554] The amount of cAMP generated (nM) in each well is converted to a percent of the maximal response observed with either human GLP-1₍₇₋₃₆₎NH₂ (SEQ ID NO:1221), human Glucagon (hGcg) (SEQ ID NO:1222), or human GIP₍₁₋₄₂₎NH₂ (SEQ ID NO:1223). A relative EC₅₀ value is derived by non-linear regression analysis using the percent maximal response vs. the concentration of peptide added, fitted to a four-parameter logistic equation.

[0555] The geometric mean of relative EC₅₀ data for exemplary dual agonist conjugates, hGcg, hGIP₍₁₋₄₂₎NH₂, and hGLP-1₍₇₋₃₆₎NH₂ and are shown in Table 4 below and exemplary triple agonist conjugates, hGcg, hGIP₍₁₋₄₂₎NH₂, and hGLP-1₍₇₋₃₆₎NH₂ are shown in Table 5 below.

TABLE 4
Functional cAMP potency (Rel EC₅₀ (nM) for exemplary dual agonist therapeutic polypeptide
Fc conjugates and comparators in the presence of 1% HSA and 0.1% Casein.

| | hGcR 1% | hGIPR 1% | hGLP-1R 1% | hGcgR 0.1% | hGIPR 0.1% | hGLP-1R 0.1% |
|---|---|---|---|---|---|---|
| | HSA Rel | HSA Rel | HSA Rel | Casein Rel | Casein Rel | Casein Rel |
| Compound | EC₅₀ (nM) | EC₅₀ (nM) | EC₅₀ (nM) | EC₅₀ (nM) | EC₅₀ (nM) | EC₅₀ (nM) |
| hGcg | 2.5 | >300 | 160 | 2.19 | >300 | 116 |
| hGIP₁₋₄₂ | >9950 (n = | 0.39 | >9950 | 95.7 (n = | 0.467 | >9950 |
| amide | 1/194) | | | 1/219) | | |
| hGLP-1₇₋₃₆ | >99.5 (n = | >99.5 | 0.39 | 77.7 (n = | >99.5 | 0.338 |
| amide | 1/195) | | | 1/232) | | |
| 1 | >1200 (n = | 5.16 | 548.0 | >1200 (n = | 0.032 | 10.60 |
| | 1/16) | | | 1/16) | | |
| 2 | >627 (n = | 1.19 | 247.0 | >627 (n = | 0.027 | 4.81 |
| | 1/2) | | | 1/2) | | |
| 3 | >552 (n = | 4.29 | >552 | >552 (n = | 0.024 | 2.91 |
| | 1/2) | | | 1/2) | | |
| 4 | >672 (n = | 5.20 | >672 | >672 (n = | 0.029 | 8.36 |
| | 1/2) | | | 1/2) | | |
| 5 | >741 (n = | 5.02 | >741 | >741 (n = | 0.025 | 6.24 |
| | 1/2) | | | 1/2) | | |
| 6 | >542 (n = | 2.99 | >542 | >542 (n = | 0.019 | 3.48 |
| | 1/2) | | | 1/2) | | |
| 7 | >677 (n = | 3.97 | 405.0 | >677 (n = | 0.024 | 3.40 |
| | 1/2) | | | 1/2) | | |
| 8 | >383 | 2.22 | >383 | >383 | 0.020 | 4.12 |
| 9 | >602 (n = | 3.54 | 245.0 | >602 (n = | 0.029 | 2.95 |
| | 1/2) | | | 1/2) | | |
| 10 | >532 (n = | 2.30 | 200.0 | >532 (n = | 0.017 | 2.22 |
| | 1/2) | | | 1/2) | | |
| 11 | >801 | 3.74 | >801 | >801 | 0.040 | 4.00 |
| 12 | >980 | 5.68 | >980 | >980 | 0.049 | 3.97 |
| 13 | >980 | 4.02 | 490.0 | >980 | 0.036 | 3.86 |
| 14 | >602 | 2.15 | 281.0 | >602 | 0.028 | 4.40 |
| 15 | >826 (n = | 5.08 | 153.0 | >826 (n = | 0.031 | 0.86 |
| | 1/2) | | | 1/2) | | |
| 16 | >836 (n = | 7.33 | 156.0 | >836 (n = | 0.047 | 0.88 |
| | 1/2) | | | 1/2) | | |
| 17 | >761 (n = | 13.50 | 228.0 | >761 (n = | 0.127 | 1.42 |
| | 1/2) | | | 1/2) | | |
| 18 | >826 (n = | 6.93 | 274.0 | >826 (n = | 0.040 | 1.47 |
| | 1/2) | | | 1/2) | | |
| 19 | >642 (n = | 12.40 | 176.0 | >642 (n = | 0.178 | 0.88 |
| | 1/2) | | | 1/2) | | |
| 20 | >891 (n = | 7.50 | 63.0 | >891 (n = | 0.159 | 0.92 |
| | 1/2) | | | 1/2) | | |
| 21 | >1030 | 7.36 | 71.1 | 111 | 0.076 | 0.62 |
| 22 | >950 | 2.23 | 110.0 | >950 | 0.044 | 1.62 |
| 23 | >935 | 2.00 | 251.0 | >935 | 0.032 | 5.00 |
| 24 | >975 | 3.76 | 399.0 | >975 | 0.036 | 3.36 |
| 25 | >975 | 3.47 | 207.0 | >975 | 0.028 | 2.86 |
| 26 | >1330 | 3.70 | 681.0 | >1330 | 0.031 | 6.41 |
| 27 | >1010 | 5.08 | >1010 | >1010 | 0.037 | 9.34 |
| 28 | >1100 (n = | 2.60 | 203.0 | >1100 (n = | 0.024 | 1.35 |
| | 1/2) | | | 1/2) | | |
| 29 | >1160 (n = | 2.79 | 158.0 | >1160 (n = | 0.024 | 1.26 |
| | 1/2) | | | 1/2) | | |
| 30 | >1100 (n = | 2.30 | 203.0 | >1100 (n = | 0.020 | 1.58 |
| | 1/2) | | | 1/2) | | |
| 31 | >871 | 3.52 | 229.0 | >871 | 0.026 | 1.88 |
| 32 | >1310 (n = | 2.62 | 190.0 | >1310 (n = | 0.097 | 2.74 |
| | 1/17) | | | 1/17) | | |
| 33 | >726 | 2.25 | 113.0 | >726 | 0.042 | 2.11 |
| 34 | >725 | 3.67 | 286.0 | >725 | 0.037 | 2.14 |
| 35 | >735 | 4.41 | 210.0 | >735 | 0.041 | 2.27 |
| 36 | >836 | 5.95 | 332.0 | >836 | 0.051 | 2.74 |
| 37 | >701 | 3.39 | 490.0 | >701 | 0.040 | 2.21 |
| 38 | >632 | 3.51 | 183.0 | >632 | 0.040 | 1.97 |
| 39 | >558 | 2.56 | 125.0 | >558 | 0.032 | 1.92 |
| 40 | >711 | 2.96 | 113.0 | >711 | 0.037 | 0.96 |
| 41 | >443 | 3.21 | 82.8 | >443 | 0.086 | 0.85 |
| 42 | >1110 | 24.00 | 540.0 | >1110 | 0.059 | 1.45 |
| 43 | >1090 | 24.00 | 339.0 | >1090 | 0.124 | 1.31 |
| 44 | >1160 | 5.15 | 53.9 | >1160 | 0.083 | 0.85 |
| 45 | >1030 | 5.35 | 53.2 | >1030 | 0.166 | 0.96 |
| 46 | >915 (n = | 1.68 | 120.0 | >915 (n = | 0.032 | 1.61 |
| | 1/8) | | | 1/8) | | |
| 47 | >1220 (n = | 2.00 | 101.0 | >1220 (n = | 0.027 | 1.03 |
| | 1/9) | | | 1/9) | | |
| 48 | >1130 | 0.85 | 103.0 | >1130 | 0.050 | 2.13 |
| 49 | | 1.07 | ND | | 0.027 | ND |
| 50 | | 1.19 | ND | | 0.019 | 0.78 |
| 51 | >846 | 1.67 | 204.0 | >846 | 0.026 | 1.02 |
| 52 | >871 | 2.43 | 152.0 | >871 | 0.036 | 0.70 |
| 53 | >876 | ND | 118.0 | >876 | ND | 0.73 |
| 54 | >876 | 3.06 | 121.0 | >876 | 0.040 | 0.71 |
| 55 | >537 | 4.48 | 253.0 | >537 | 0.051 | 2.94 |
| 56 | >950 | 3.70 | 317.0 | >950 | 0.041 | 3.57 |
| 57 | >527 | 6.65 | 295.0 | >527 | 0.041 | 3.01 |
| 58 | >1120 | 9.17 | 238.0 | >1120 | 0.038 | 0.73 |
| 59 | >1160 | 9.85 | 241.0 | >1160 | 0.029 | 0.93 |
| 60 | >1110 | 5.80 | 347.0 | >1110 | 0.031 | 1.00 |
| 61 | >1100 | 7.79 | 302.0 | >1100 | 0.047 | 0.92 |
| 62 | >1130 | 13.00 | 310.0 | >1130 | 0.048 | 0.76 |
| 63 | >1350 | 9.01 | 308.0 | >1350 | 0.023 | 0.65 |
| 64 | >1040 | 19.20 | 235.0 | >1040 | 0.059 | 1.05 |
| 65 | >861 | 12.00 | 210.0 | >861 | 0.029 | 0.86 |
| 66 | >955 | 15.20 | 365.0 | >955 | 0.042 | 1.07 |
| 67 | >791 | 11.30 | 336.0 | >791 | 0.038 | 1.37 |
| 68 | >905 | 16.30 | 565.0 | >905 | 0.039 | 1.93 |
| 69 | >856 | 11.10 | 381.0 | >856 | 0.053 | 1.03 |
| 70 | >1020 | 2.71 | 191.0 | >1020 | 0.024 | 1.81 |
| 71 | >1050 | 2.59 | 186.0 | >1050 | 0.042 | 1.03 |
| 72 | >1100 | 2.11 | 177.0 | >1100 | 0.043 | 2.01 |
| 73 | >1220 | 4.58 | 472.0 | >1220 | 0.041 | 1.97 |
| 74 | >1060 | 4.22 | 232.0 | >1060 | 0.032 | 1.26 |
| 75 | >1110 | 3.93 | 254.0 | >1110 | 0.042 | 1.15 |
| 76 | >1180 | 3.39 | 324.0 | >1180 | 0.036 | 1.39 |
| 77 | >871 | 3.95 | 270.0 | >871 | 0.057 | 1.64 |
| 78 | >552 | 4.76 | >552 | >552 | 0.061 | 6.62 |
| 79 | >1020 | 6.00 | >1020 | >1020 | 0.051 | 8.38 |
| 80 | >502 | 10.90 | >502 | >502 | 0.035 | 1.85 |
| 81 | >1020 | 11.40 | 304.0 | >1020 | 0.045 | 1.69 |
| 82 | >970 | 10.50 | 448.0 | >970 | 0.035 | 1.85 |
| 83 | >940 | 6.08 | 360.0 | >940 | 0.049 | 2.83 |
| 84 | >493 | 2.62 | 132.0 | >493 | 0.054 | 1.91 |
| 85 | >940 | 2.47 | 174.0 | >940 | 0.054 | 1.89 |
| 86 | >995 | 13.00 | >995 | >995 | 0.048 | 3.25 |
| 87 | >1120 | 16.60 | >1120 | >1210 | 0.044 | 3.49 |
| 88 | >866 | 5.41 | 459.0 | >866 | 0.050 | 4.52 |
| 89 | >985 | 3.67 | 315.0 | >985 | 0.066 | 6.03 |
| 90 | >413 | 12.50 | >413 | >413 | 0.047 | 1.92 |
| 91 | >980 | 10.20 | 590.0 | >980 | 0.056 | 2.82 |
| 92 | >990 | 8.11 | 644.0 | >990 | 0.038 | 2.41 |
| 93 | >965 | 2.23 | 276.0 | >965 | 0.044 | 3.15 |
| 94 | >746 | 4.37 | 326.0 | >746 | 0.062 | 3.09 |
| 95 | >920 | 2.26 | 377.0 | >920 | 0.037 | 2.45 |
| 96 | >627 | 2.78 | 116.0 | >627 | 0.083 | 1.25 |
| 97 | >1190 (n = | 1.12 | 111.0 | >1190 (n = | 0.047 | 1.00 |
| | 1/5) | | | 1/5) | | |
| 98 | >1150 (n = | 2.26 | 242.0 | >1150 (n = | 0.038 | 2.06 |
| | 1/5) | | | 1/5) | | |
| 99 | >1210 (n = | 4.19 | 146.0 | >1210 (n = | 0.076 | 1.32 |
| | 1/5) | | | 1/5) | | |
| 100 | >771 (n = | 1.99 | 236.0 | >771 (n = | 0.050 | 2.52 |
| | 1/5) | | | 1/5) | | |
| 101 | >672 (n = | 1.43 | 130.0 | >672 (n = | 0.072 | 2.66 |
| | 1/5) | | | 1/5) | | |
| 102 | >1290 (n = | 2.43 | 80.4 | >1290 (n = | 0.102 | 1.86 |
| | 1/3) | | | 1/3) | | |
| 103 | >1080 | 2.21 | 67.0 | 612 | 0.064 | 0.71 |
| 104 | >1220 | 1.88 | 59.1 | >1220 | 0.036 | 0.61 |
| 105 | >1160 | 1.85 | 77.6 | >1160 | 0.060 | 0.93 |
| 106 | >1160 | 1.53 | 70.3 | >1160 | 0.035 | 0.45 |
| 107 | >1120 | 2.31 | 53.1 | >1120 | 0.049 | 0.55 |
| 108 | >1220 | 2.09 | 90.3 | >1220 | 0.057 | 0.58 |
| 109 | >1180 | 0.86 | 28.0 | >1180 | 0.069 | 0.87 |
| 110 | >1160 | 1.23 | 34.9 | >1160 | 0.052 | 0.75 |
| 111 | >1050 | 1.35 | 26.7 | >1050 | 0.079 | 0.78 |
| 112 | >1210 (n = | 1.25 | 42.7 | >1210 (n = | 0.071 | 1.47 |
| | 1/3) | | | 1/3) | | |
| 113 | >1140 (n = | 1.01 | 39.4 | >1140 (n = | 0.078 | 1.00 |
| | 1/3) | | | 1/3) | | |
| 114 | >1000 | 0.98 | 40.9 | 324 | 0.036 | 0.80 |
| 115 | >1160 (n = | 2.99 | 93.0 | >1160 (n = | 0.073 | 1.42 |
| | 1/3) | | | 1/3) | | |
| 116 | >970 (n = | 2.84 | 100.0 | >970 (n = | 0.059 | 1.53 |
| | 1/2) | | | 1/2) | | |
| 117 | >821 (n = | 1.85 | 64.3 | >821 (n = | 0.044 | 0.65 |
| | 1/2) | | | 1/2) | | |
| 118 | >1050 (n = | 1.75 | 70.3 | >1050 (n = | 0.031 | 0.83 |
| | 1/2) | | | 1/2) | | |
| 119 | >925 (n = | 1.17 | 44.8 | >925 (n = | 0.024 | 0.39 |
| | 1/2) | | | 1/2) | | |
| 120 | >1010 (n = | 1.20 | 41.0 | >1010 (n = | 0.044 | 1.08 |
| | 1/2) | | | 1/2) | | |
| 121 | >1100 (n = | 1.43 | 60.8 | >1100 (n = | 0.034 | 0.57 |
| | 1/2) | | | 1/2) | | |
| 122 | >1070 | 0.93 | 41.0 | >1070 | 0.023 | 0.77 |
| 123 | >662 | 2.45 | 80.1 | >662 | 0.032 | 0.36 |
| 124 | >632 (n = | 1.49 | 75.2 | >632 (n = | 0.038 | 0.69 |
| | 1/4) | | | 1/4) | | |
| 125 | >632 | 1.93 | 67.7 | >632 | 0.022 | 0.40 |
| 126 | >856 | 1.13 | 59.3 | >856 | 0.028 | 0.43 |
| 127 | >1080 (n = | 0.89 | 27.2 | >1080 (n = | 0.037 | 0.66 |
| | 1/3) | | | 1/3) | | |
| 128 | >861 (n = | 0.83 | 23.5 | >861 (n = | 0.040 | 0.58 |
| | 1/3) | | | 1/3) | | |
| 129 | >1020 (n = | 1.01 | 35.1 | >1020 (n = | 0.034 | 0.86 |
| | 1/3) | | | 1/3) | | |
| 130 | >945 (n = | 0.90 | 33.6 | >945 (n = | 0.050 | 0.67 |
| | 1/3) | | | 1/3) | | |
| 131 | >940 (n = | 2.40 | 163.0 | >940 (n = | 0.062 | 1.24 |
| | 1/2) | | | 1/2) | | |
| 132 | >1040 (n = | 2.57 | 159.0 | >1040 (n = | 0.062 | 1.66 |
| | 1/2) | | | 1/2) | | |
| 133 | >1010 (n = | 3.58 | 248.0 | >1010 (n = | 0.051 | 2.10 |
| | 1/7) | | | 1/7) | | |
| 134 | >935 (n = | 1.66 | 104.0 | >935 (n = | 0.048 | 0.94 |
| | 1/9) | | | 1/9) | | |
| 135 | >955 | 6.31 | 310.0 | >955 | 0.053 | 1.19 |
| 136 | >1230 (n = | 1.83 | 79.5 | >1230 (n = | 0.042 | 0.93 |
| | 1/7) | | | 1/7) | | |
| 137 | >1090 | 1.86 | 99.5 | >1090 | 0.038 | 1.00 |
| 138 | >1050 | 5.87 | 208.0 | >1050 | 0.052 | 0.78 |
| 139 | >846 (n = | 1.82 | 177.0 | >846 (n = | 0.056 | 2.65 |
| | 1/6) | | | 1/6) | | |
| 140 | >1210 (n = | 1.43 | 123.0 | >1210 (n = | 0.052 | 1.99 |
| | 1/5) | | | 1/5) | | |
| 141 | >1050 (n = | 1.94 | 77.0 | >1050 (n = | 0.064 | 1.98 |
| | 1/2) | | | 1/2) | | |
| 142 | >1100 | 2.53 | 128.0 | >1100 | 0.041 | 1.16 |
| 143 | >1130 | 1.89 | 88.1 | >1130 | 0.061 | 1.90 |
| 144 | >1020 | 1.97 | 111.0 | >1020 | 0.058 | 1.74 |
| 145 | >831 | 2.15 | 82.3 | >831 | 0.062 | 1.28 |
| 146 | >935 | 1.54 | 89.5 | >935 | 0.056 | 0.87 |
| 147 | >1850 (n = | 1.62 | 110.0 | >1850 (n = | 0.033 | 1.05 |
| | 1/5) | | | 1/5) | | |
| 148 | >1160 (n = | 1.55 | 99.0 | >1160 (n = | 0.036 | 0.75 |
| | 1/5) | | | 1/5) | | |
| 149 | >1330 (n = | 1.76 | 91.6 | >1330 (n = | 0.030 | 0.70 |
| | 1/4) | | | 1/4) | | |
| 150 | >1100 (n = | 1.62 | 181.0 | >1100 (n = | 0.033 | 1.80 |
| | 1/4) | | | 1/4) | | |
| 151 | >1620 (n = | 2.41 | 189.0 | >1620 (n = | 0.020 | 1.11 |
| | 1/3) | | | 1/3) | | |
| 152 | >1450 (n = | 2.84 | 228.0 | >1450 (n = | 0.035 | 1.17 |
| | 1/3) | | | 1/3) | | |
| 153 | >1610 (n = | 2.95 | 245.0 | >1610 (n = | 0.038 | 1.51 |
| | 1/3) | | | 1/3) | | |
| 154 | >1410 (n = | 2.18 | 176.0 | >1410 (n = | 0.024 | 0.86 |
| | 1/3) | | | 1/3) | | |
| 155 | >1610 (n = | 2.27 | 203.0 | >1610 (n = | 0.023 | 0.93 |
| | 1/3) | | | 1/3) | | |
| 156 | >1650 (n = | 2.32 | 190.0 | >1650 (n = | 0.031 | 1.19 |
| | 1/3) | | | 1/3) | | |
| 157 | >771 (n = | 1.95 | 284.0 | >771 (n = | 0.024 | 1.61 |
| | 1/4) | | | 1/4) | | |
| 158 | >945 (n = | 1.39 | 106.0 | >945 (n = | 0.030 | 0.79 |
| | 1/6) | | | 1/6) | | |
| 159 | >2380 (n = | 1.08 | 195.0 | >2380 (n = | 0.027 | 1.51 |
| | 1/4) | | | 1/4) | | |
| 160 | >1660 (n = | 2.71 | 326.0 | >1660 (n = | 0.036 | 1.52 |
| | 1/2) | | | 1/3) | | |
| 161 | >1890 (n = | 2.72 | 199.0 | >1890 (n = | 0.035 | 1.44 |
| | 1/4) | | | 1/4) | | |
| 162 | >1340 (n = | 2.74 | 242.0 | >1340 (n = | 0.035 | 1.09 |
| | 1/2) | | | 1/3) | | |
| 163 | >1500 (n = | 2.69 | 242.0 | >1500 (n = | 0.032 | 1.49 |
| | 1/2) | | | 1/2) | | |
| 164 | >1450 (n = | 0.96 | 55.1 | >1450 (n = | 0.043 | 0.76 |
| | 1/7) | | | 1/7) | | |
| 165 | >1570 (n = | 1.47 | 150.0 | >1570 (n = | 0.032 | 2.15 |
| | 1/2) | | | 1/2) | | |
| 166 | >1060 (n = | 2.30 | 293.0 | 106 (se = | 0.028 | 1.97 |
| | 1/3) | | | 7.08, n = 3) | | |
| 167 | >1040 (n = | 1.40 | 125.0 | >1040 (n = | 0.025 | 1.08 |
| | 1/2) | | | 1/2) | | |
| 168 | >1180 (n = | 1.46 | 106.0 | 621 (se = | 0.029 | 1.03 |
| | 1/9) | | | 304, n = 2/9) | | |
| 169 | >1170 (n = | 1.01 | 49.5 | >1170 (n = | 0.027 | 0.60 |
| | 1/6) | | | 1/6) | | |
| 170 | >1660 (n = | 3.05 | 129.0 | >1660 (n = | 0.040 | 0.86 |
| | 1/13) | | | 1/13) | | |
| 171 | >1190 (n = | 2.43 | 122.0 | >1190 (n = | 0.026 | 0.71 |
| | 1/3) | | | 1/3) | | |
| 172 | >1090 (n = | 1.75 | 93.2 | >1090 (n = | 0.038 | 0.94 |
| | 1/13) | | | 1/13) | | |
| 173 | >1040 (n = | 3.00 | 138.0 | >1040 (n = | 0.030 | 0.69 |
| | 1/7) | | | 1/7) | | |
| 174 | >791 (n = | 2.09 | 93.5 | >791 (n = | 0.047 | 0.65 |
| | 1/3) | | | 1/3) | | |
| 175 | >851 (n = | 2.10 | 113.0 | 197 (se = | 0.045 | 1.14 |
| | 1/6) | | | 34.7, n = 5/6) | | |
| 176 | >975 (n = | 1.88 | 97.2 | 470 (se = | 0.040 | 0.86 |
| | 1/6) | | | 164, n = 5/6) | | |
| 177 | >970 (n = | 2.32 | 160.0 | >970 (n = | 0.044 | 1.62 |
| | 1/6) | | | 1/6) | | |
| 178 | >905 (n = | 1.98 | 131.0 | >905 (n = | 0.032 | 1.04 |
| | 1/6) | | | 1/6) | | |
| 179 | >915 (n = | 1.90 | 89.5 | >915 (n = | 0.044 | 0.97 |
| | 1/5) | | | 1/5) | | |
| 180 | >900 (n = | 1.40 | 62.3 | >900 (n = | 0.040 | 0.69 |
| | 1/5) | | | 1/5) | | |
| 181 | >980 (n = | 1.86 | 101.0 | >980 (n = | 0.023 | 0.71 |
| | 1/3) | | | 1/3) | | |
| 182 | >1030 (n = | 1.45 | 93.2 | >1030 (n = | 0.033 | 0.70 |
| | 1/3) | | | 1/3) | | |
| 183 | >348 (n = | 1.00 | 90.9 | >348 (n = | 0.037 | 0.99 |
| | 1/2) | | | 1/2) | | |
| 184 | >786 (n = | 1.73 | 130.0 | >786 (n = | 0.020 | 1.00 |
| | 1/4) | | | 1/4) | | |
| 185 | >1180 (n = | 1.47 | 102.0 | >1180 (n = | 0.025 | 0.73 |
| | 1/4) | | | 1/4) | | |
| 186 | >1140 (n = | 2.29 | 194.0 | >1140 (n = | 0.035 | 1.11 |
| | 1/3) | | | 1/3) | | |
| 187 | >632 (n = | 1.91 | 125.0 | >632 (n = | 0.051 | 1.20 |
| | 1/3) | | | 1/3) | | |
| 188 | >945 (n = | 1.44 | 105.0 | >945 (n = | 0.034 | 0.87 |
| | 1/3) | | | 1/3) | | |
| 189 | >502 (n = | 2.40 | 142.0 | >502 (n = | 0.078 | 1.13 |
| | 1/2) | | | 1/2) | | |
| 190 | >1150 (n = | 1.51 | 119.0 | >1150 (n = | 0.036 | 0.58 |
| | 1/2) | | | 1/2) | | |
| 191 | >1150 (n = | 1.19 | 73.9 | >1150 (n = | 0.035 | 0.69 |
| | 1/2) | | | 1/2) | | |
| 192 | >806 (n = | 1.15 | 76.8 | 59.6 (se = | 0.031 | 0.90 |
| | 1/5) | | | 12.0, n = 5) | | |
| 193 | >995 (n = | 1.17 | 120.0 | 377 (n = | 0.060 | 1.38 |
| | 1/2) | | | 1/2) | | |
| 194 | >1270 (n = | 1.99 | 104.0 | >1270 (n = | 0.045 | 1.06 |
| | 1/4) | | | 1/4) | | |
| 195 | >1180 (n = | 1.41 | 84.0 | >1180 (n = | 0.053 | 1.40 |
| | 1/2) | | | 1/2) | | |
| 196 | >1090 (n = | 1.10 | 55.3 | >1090 (n = | 0.049 | 0.94 |
| | 1/2) | | | 1/2) | | |
| 197 | >1070 (n = | 1.37 | 111.0 | >1070 (n = | 0.042 | 1.08 |
| | 1/3) | | | 1/3) | | |
| 198 | >1010 (n = | 0.89 | 101.0 | 127 (se = | 0.045 | 2.53 |
| | 1/3) | | | 22.1, n = 3) | | |
| 199 | >1060 (n = | 0.82 | 181.0 | >1270 (n = | 0.063 | 3.86 |
| | 1/3) | | | 1/4) | | |
| 200 | >1090 (n = | 1.28 | 64.5 | 881 (se = | 0.074 | 1.57 |
| | 1/2) | | | 80.9, n = 2/3) | | |
| 201 | >1160 (n = | 1.28 | 94.1 | >1160 (n = | 0.110 | 2.10 |
| | 1/2) | | | 1/2) | | |
| 202 | >1160 (n = | 1.17 | 50.9 | >1160 (n = | 0.038 | 0.83 |
| | 1/3) | | | 1/3) | | |
| 203 | >577 (n = | 1.20 | 82.6 | >577 (n = | 0.102 | 0.84 |
| | 1/3) | | | 1/3) | | |
| 204 | >1270 (n = | 1.59 | 69.6 | >1270 (n = | 0.043 | 1.00 |
| | 1/7) | | | 1/7) | | |
| 205 | >1230 (n = | 1.20 | 104.0 | >1230 (n = | 0.044 | 1.13 |
| | 1/3) | | | 1/3) | | |
| 206 | >1490 (n = | 3.04 | 153.0 | >1490 (n = | 0.041 | 1.02 |
| | 1/4) | | | 1/4) | | |
| 207 | >1330 (n = | 2.03 | 111.0 | >1330 (n = | 0.054 | 0.86 |
| | 1/4) | | | 1/4) | | |
| 208 | >498 (n = | 2.05 | 99.2 | >498 (n = | 0.128 | 1.08 |
| | 1/4) | | | 1/4) | | |
| 209 | >1120 (n = | 1.27 | 72.2 | >1120 (n = | 0.186 | 1.01 |
| | 1/4) | | | 1/4) | | |
| 210 | >1190 (n = | 2.42 | 140.0 | >1190 (n = | 0.040 | 1.38 |
| | 1/3) | | | 1/3) | | |
| 211 | >1220 (n = | 1.37 | 96.3 | >1220 (n = | 0.038 | 0.87 |
| | 1/3) | | | 1/3) | | |
| 212 | >1070 (n = | 1.69 | 87.7 | >1070 (n = | 0.045 | 0.98 |
| | 1/4) | | | 1/4) | | |
| 213 | >771 (n = | 1.52 | 66.2 | >771 (n = | 0.073 | 0.95 |
| | 1/4) | | | 1/4) | | |
| 214 | >1480 (n = | 1.06 | 36.7 | >1480 (n = | 0.035 | 0.50 |
| | 1/4) | | | 1/4) | | |
| 215 | >1040 (n = | 1.16 | 68.2 | 87.4 (se = | 0.064 | 1.24 |
| | 1/4) | | | 6.90, n = 4) | | |
| 216 | >1260 (n = | 2.16 | 102.0 | 587 (se = | 0.062 | 1.14 |
| | 1/4) | | | 128, n = 3) | | |
| 217 | >1220 (n = | 12.40 | 58.7 | >1220 (n = | 0.375 | 1.06 |
| | 1/4) | | | 1/4) | | |
| 218 | >846 (n = | 5.83 | 54.4 | >846 (n = | 0.185 | 0.72 |
| | 1/3) | | | 1/3) | | |
| 219 | >1070 (n = | 1.83 | 73.1 | >1070 (n = | 0.057 | 1.51 |
| | 1/3) | | | 1/3) | | |
| 220 | >1030 (n = | 1.39 | 78.5 | >1030 (n = | 0.034 | 1.39 |
| | 1/3) | | | 1/3) | | |
| 221 | >1130 (n = | 1.15 | 78.7 | >1130 (n = | 0.053 | 1.21 |
| | 1/3) | | | 1/3) | | |
| 222 | >1130 (n = | 1.98 | 123.0 | >1130 (n = | 0.039 | 1.24 |
| | 1/2) | | | 1/2) | | |
| 223 | >1200 (n = | 1.38 | 64.9 | >1200 (n = | 0.036 | 0.92 |
| | 1/2) | | | 1/2) | | |
| 224 | >910 (n = | 0.76 | 251.0 | 296 (se = | 0.004 | 3.27 |
| | 1/2) | | | 302, n = 2) | | |
| 225 | >1030 (n = | 0.89 | 126.0 | >1030 (n = | 0.030 | 1.76 |
| | 1/3) | | | 1/3) | | |
| 226 | >697 (n = | 1.02 | 72.1 | 332 (se = | 0.056 | 1.17 |
| | 1/5) | | | 94.4, n = 5) | | |
| 227 | >667 (n = | 1.44 | 128.0 | >667 (n = | 0.038 | 0.92 |
| | 1/5) | | | 1/5) | | |
| 228 | >781 (n = | 1.33 | 89.5 | >781 (n = | 0.045 | 0.89 |
| | 1/4) | | | 1/4) | | |
| 229 | >1290 (n = | 0.86 | 64.5 | >1290 (n = | 0.033 | 0.85 |
| | 1/3) | | | 1/3) | | |
| 230 | >1200 (n = | 0.83 | 104.0 | >1200 (n = | 0.029 | 2.24 |
| | 1/3) | | | 1/3) | | |
| 231 | >1230 (n = | 1.09 | 58.0 | >1230 (n = | 0.038 | 0.67 |
| | 1/3) | | | 1/3) | | |
| 232 | >1130 (n = | 1.62 | 81.3 | >1130 (n = | 0.029 | 0.96 |
| | 1/3) | | | 1/3) | | |
| 233 | >1140 (n = | 1.55 | 283.0 | >1140 (n = | 0.040 | 5.50 |
| | 1/3) | | | 1/3) | | |
| 234 | >1140 (n = | 3.94 | 178.0 | >1140 (n = | 0.042 | 2.25 |
| | 1/3) | | | 1/3) | | |
| 235 | >1100 (n = | 1.77 | 212.0 | >1100 (n = | 0.058 | 3.80 |
| | 1/3) | | | 1/3) | | |
| 236 | >995 (n = | 1.18 | 90.6 | >995 (n = | 0.027 | 1.54 |
| | 1/4) | | | 1/4) | | |
| 237 | >965 (n = | 1.10 | 53.3 | >965 (n = | 0.033 | 0.86 |
| | 1/4) | | | 1/4) | | |
| 238 | >945 (n = | 2.23 | 85.1 | >945 (n = | 0.038 | 1.02 |
| | 1/4) | | | 1/4) | | |
| 239 | >909 (n = | 5.47 | 57.0 | >909 (n = | 0.089 | 0.97 |
| | 1/2) | | | 1/2) | | |
| 480 | >1360 (n = | 1.62 | 360.0 | >1360 (n = | 0.045 | 4.00 |
| | 1/6) | | | 1/6) | | |
| 481 | >1190 (n = | 1.90 | 283.0 | >1190 (n = | 0.051 | 6.93 |
| | 1/2) | | | 1/2) | | |
| 482 | >1360 (n = | 2.61 | 362.0 | >1360 (n = | 0.055 | 5.05 |
| | 1/5) | | | 1/5) | | |
| 243 | >886 (n = | 0.08 | 5.4 | >886 (n = | 0.085 | 4.97 |
| | 1/3) | | | 1/3) | | |
| 244 | >1040 | 0.04 | 6.1 | >1040 | 0.057 | 9.33 |
| 246 | >896 | 5.72 | 391.0 | >896 | 0.031 | 2.79 |
| 247 | >836 | 0.28 | 205.0 | >836 | 0.024 | 15.40 |
| 248 | >547 | 0.77 | 196.0 | >547 | 0.040 | 11.70 |
| 249 | >715 | 3.95 | 131.0 | >715 | 0.046 | 1.09 |
| 250 | >948 | 9.69 | 302.0 | >948 | 0.043 | 1.10 |
| 251 | >1120 | 0.24 | 17.1 | >1120 | 0.042 | 1.46 |
| 253 | >970 (n = | 0.76 | 89.4 | >970 (n = | 0.079 | 2.63 |
| | 1/2) | | | 1/2) | | |
| 254 | >642 (n = | 0.43 | 34.3 | >642 (n = | 0.028 | 1.44 |
| | 1/2) | | | 1/2) | | |
| 255 | >1070 (n = | 0.28 | 33.8 | >1070 (n = | 0.026 | 1.74 |
| | 1/2) | | | 1/2) | | |
| 256 | >871 | 0.32 | 25.7 | >871 | 0.019 | 1.86 |
| 257 | >453 | 0.59 | 38.8 | >453 | 0.032 | 0.67 |
| 258 | >960 | 0.71 | 34.0 | >960 | 0.019 | 0.70 |
| 259 | >1000 | 0.60 | 31.0 | >1000 | 0.021 | 0.59 |
| 260 | >1210 | 0.67 | 45.0 | >1210 | 0.034 | 1.27 |
| 261 | >1110 (n = | 0.52 | 25.6 | >1110 (n = | 0.013 | 0.17 |
| | 1/3) | | | 1/3) | | |
| 40 | >711 | 2.96 | 113.0 | >711 | 0.037 | 0.96 |
| 266 | >1050 (n = | 1.04 | 174.0 | >1050 (n = | 0.016 | 1.83 |
| | 1/16) | | | 1/16) | | |
| 305 | >766 (n = | 2.67 | 230.0 | >766 (n = | 0.048 | 1.20 |
| | 1/3) | | | 1/3) | | |
| 310 | >1180 (n = | 1.80 | 235.0 | >1180 (n = | 0.032 | 2.77 |
| | 1/5) | | | 1/5) | | |
| 311 | >746 (n = | 2.30 | 214.0 | >746 (n = | 0.049 | 1.60 |
| | 1/4) | | | 1/4) | | |
| 312 | >945 (n = | 1.64 | 94.2 | >945 (n = | 0.044 | 0.79 |
| | 1/4) | | | 1/4) | | |
| 313 | >716 (n = | 1.48 | 97.6 | 180 (se = | 0.088 | 0.68 |
| | 1/4) | | | 62.5, n = 4) | | |
| 314 | >771 (n = | 1.91 | 151.0 | >771 (n = | 0.054 | 1.46 |
| | 1/4) | | | 1/4) | | |
| 315 | >577 (n = | 1.17 | 159.0 | >577 (n = | 0.025 | 0.88 |
| | 1/3) | | | 1/3) | | |
| 316 | >493 (n = | 2.78 | 280.0 | >493 (n = | 0.037 | 2.04 |
| | 1/3) | | | 1/3) | | |
| 317 | >378 | 1.65 | 148.0 | >378 | 0.068 | 0.74 |
| 318 | >920 (n = | 1.45 | 125.0 | >920 (n = | 0.027 | 0.75 |
| | 1/3) | | | 1/3) | | |
| 319 | >871 (n = | 0.99 | 58.0 | >871 (n = | 0.027 | 0.47 |
| | 1/3) | | | 1/3) | | |
| 320 | >1020 (n = | 1.30 | 171.0 | >1020 (n = | 0.013 | 0.94 |
| | 1/3) | | | 1/3) | | |
| 321 | >1110 (n = | 1.23 | 103.0 | >1110 (n = | 0.017 | 0.36 |
| | 1/3) | | | 1/3) | | |
| 322 | >791 (n = | 1.17 | 151.0 | >791 (n = | 0.030 | 1.37 |
| | 1/3) | | | 1/3) | | |
| 323 | >557 (n = | 0.77 | 85.8 | >557 (n = | 0.057 | 0.78 |
| | 1/3) | | | 1/3) | | |
| 324 | >602 (n = | 1.30 | 141.0 | >602 (n = | 0.025 | 1.34 |
| | 1/3) | | | 1/3) | | |
| 325 | >1030 (n = | 1.20 | 131.0 | >1030 (n = | 0.036 | 0.66 |
| | 1/3) | | | 1/3) | | |
| 326 | >756 (n = | 1.54 | 223.0 | >756 (n = | 0.061 | 4.41 |
| | 1/4) | | | 1/4) | | |
| 327 | >726 (n = | 1.65 | 293.0 | >726 (n = | 0.062 | 3.32 |
| | 1/3) | | | 1/3) | | |
| 328 | >463 (n = | 1.41 | 204.0 | >463 (n = | 0.017 | 2.10 |
| | 1/3) | | | 1/3) | | |
| 329 | >1290 (n = | 1.34 | 144.0 | >1290 (n = | 0.028 | 2.53 |
| | 1/4) | | | 1/4) | | |
| 488 | >687 | 0.07 | 5.8 | >687 | 0.104 | 5.13 |
| 489 | >1270 (n = | 1.37 | 57.2 | 211 (se = | 0.039 | 0.81 |
| | 1/6) | | | 51.8, n = 6) | | |
| 483 | >1160 (n = | 3.68 | 112.0 | 300 (se = | 0.055 | 0.64 |
| | 1/16) | | | 40.7, n = 11/16) | | |
| 490 | >1040 (n = | 2.23 | 48.2 | 297 (se = | 0.076 | 1.05 |
| | 1/4) | | | 26.4, n = 4) | | |
| 491 | >826 (n = | 1.53 | 61.8 | 689 (se = | 0.130 | 1.08 |
| | 1/4) | | | 104, n = 3/4) | | |
| 492 | >617 (n = | 0.71 | 25.9 | 358 (se = | 0.049 | 0.84 |
| | 1/4) | | | 87.7, n = 4) | | |

TABLE 5
Functional cAMP potency Rel EC₅₀ (nM) for exemplary compounds
and comparators in the presence of 1% HSA and 0.1% Casein

| | hGcR 1% | hGIPR 1% | hGLP-1R 1% | hGcgR 0.1% | hGIPR 0.1% | hGLP-1R 0.1% |
|---|---|---|---|---|---|---|
| | HSA Rel | HSA Rel | HSA Rel | Casein Rel | Casein Rel | Casein Rel |
| Compound | EC₅₀ (nM) | EC₅₀ (nM) | EC₅₀ (nM) | EC₅₀ (nM) | EC₅₀ (nM) | EC₅₀ (nM) |
| hGcg | 2.5 | >300 | 160 | 2.19 | >300 | 116 |
| hGIP₁₋₄₂ | >9950 | 0.390 | >9950 | >99.5 | 0.467 | >9950 |
| amide | | | | | | |
| hGLP-1₇₋₃₆ | >99.5 | >99.5 | 0.39 | >99.5 | >99.5 | 0.338 |
| amide | | | | | | |
| 330 | >498 | 3.79 | 92.9 | 56.90 | 0.134 | 2.88 |
| 331 | >289 | 2.64 | 44.6 | 12.70 | 0.049 | 0.70 |
| 332 | 419 | 9.01 | 86.1 | 19.90 | 0.153 | 2.87 |
| 333 | 217 | 3.51 | 57.7 | 3.03 | 0.041 | 0.71 |
| 336 | 333 | 3.01 | 101.0 | 7.46 | 0.075 | 1.75 |
| 337 | 100 | 1.43 | 57.9 | 2.14 | 0.030 | 0.76 |
| 338 | >1290 | 2.43 | 80.4 | >1290 | 0.102 | 1.86 |
| 339 | 379 | 1.60 | 68.3 | 2.95 | 0.040 | 0.55 |
| 340 | 285 | 2.12 | 64.8 | 2.74 | 0.031 | 0.40 |
| 341 | 325 | 1.62 | 57.7 | 4.11 | 0.018 | 0.53 |
| 342 | 249 | 1.45 | 53.4 | 3.02 | 0.039 | 0.61 |
| 343 | 506 | 2.13 | 74.1 | 5.65 | 0.033 | 0.56 |
| 344 | 540 | 1.60 | 24.3 | 18.10 | 0.134 | 0.90 |
| 345 | 380 | 0.89 | 30.9 | 3.57 | 0.023 | 0.36 |
| 346 | 614 | 2.80 | 26.1 | 16.80 | 0.171 | 0.60 |
| 347 | 408 | 0.83 | 48.0 | 2.59 | 0.004 | 0.14 |
| 348 | 427 | 2.84 | 94.2 | 5.17 | 0.360 | 1.29 |
| 349 | 385 | 1.36 | 75.2 | 3.69 | 0.016 | 0.60 |
| 350 | >18.3 | 1.48 | >18.3 | 2.61 | 0.033 | 0.72 |
| 351 | >17.8 | 1.51 | >17.8 | 4.61 | 0.049 | 1.36 |
| 352 | 308 | 1.39 | 56.2 | 3.97 | 0.037 | 0.68 |
| 353 | >11.1 | 1.42 | 32.4 | 8.40 | 0.106 | 1.96 |
| 354 | 556 | 1.26 | 96.6 | 4.67 | 0.215 | 1.11 |
| 355 | >19.3 | 0.57 | >19.3 | 1.86 | 0.002 | 0.19 |
| 356 | >756 | 1.63 | 96.4 | 2.37 | 0.042 | 1.19 |
| 357 | 374 | 1.60 | 81.8 | 3.25 | 0.022 | 0.70 |
| 358 | 388 | 2.75 | 91.1 | 3.24 | 0.089 | 1.27 |
| 359 | 686 | 3.70 | 143.0 | 6.27 | 0.058 | 1.47 |
| 360 | 608 | 7.16 | 228.0 | 20.30 | 0.284 | 4.35 |
| 361 | 723 | 4.04 | 160.0 | 19.60 | 0.149 | 2.41 |
| 362 | 613 | 2.81 | 111.0 | 13.90 | 0.093 | 1.65 |
| 363 | 695 | 3.15 | 114.0 | 27.30 | 0.093 | 2.18 |
| 364 | 1050 | 8.95 | 198.0 | 22.30 | 0.263 | 3.00 |
| 365 | 148 | 1.63 | 52.8 | 2.73 | 0.035 | 0.50 |
| 366 | 291 | 1.53 | 99.3 | 3.82 | 0.173 | 1.24 |
| 367 | 211 | 1.66 | 105.0 | 1.85 | 0.038 | 0.87 |
| 368 | 207 | 1.14 | 111.0 | 2.52 | 0.056 | 1.07 |
| 369 | 476 | 2.34 | 138.0 | 6.24 | 0.042 | 1.01 |
| 370 | 577 | 1.64 | 117.0 | 9.23 | 0.027 | 1.26 |
| 371 | 996 | 2.11 | 252.0 | 27.70 | 0.033 | 2.45 |
| 372 | 360 | 1.80 | 133.0 | 4.35 | 0.026 | 0.78 |
| 373 | >1330 | 1.20 | 86.6 | 29.30 | 0.024 | 0.70 |
| 374 | 346 | 2.18 | 198.0 | 2.92 | 0.027 | 1.00 |
| 375 | 670 | 2.48 | 167.0 | 6.31 | 0.082 | 1.01 |
| 376 | 631 | 1.84 | 129.0 | 8.02 | 0.064 | 0.81 |
| 377 | 535 | 2.00 | 128.0 | 3.96 | 0.058 | 0.99 |
| 378 | 145 | 4.05 | 89.9 | 1.72 | 0.105 | 0.80 |
| 379 | 512 | 1.23 | 159.0 | 7.82 | 0.010 | 1.05 |
| 380 | 332 | 1.21 | 177.0 | 3.83 | 0.010 | 1.31 |
| 381 | 235 | 1.65 | 233.0 | 2.88 | 0.022 | 2.54 |
| 382 | 151 | 1.33 | 78.6 | 1.65 | 0.043 | 0.82 |
| 383 | 473 | 1.10 | 79.4 | 4.50 | 0.013 | 0.39 |
| 384 | 149 | 0.99 | 52.5 | 2.32 | 0.021 | 0.36 |
| 385 | 499 | 1.19 | 56.9 | 6.99 | 0.016 | 0.41 |
| 386 | 444 | 1.19 | 79.2 | 4.08 | 0.019 | 0.51 |
| 387 | 512 | 2.68 | 112.0 | 7.72 | 0.017 | 0.74 |
| 388 | 464 | 1.17 | 63.5 | 6.70 | 0.021 | 0.73 |
| 389 | 544 | 1.56 | 100.0 | 10.50 | 0.031 | 1.06 |
| 390 | 174 | 1.65 | 88.2 | 1.82 | 0.022 | 0.92 |
| 391 | 494 | 1.93 | 90.3 | 9.43 | 0.030 | 0.95 |
| 392 | 412 | 0.77 | 60.5 | 12.30 | 0.030 | 1.28 |
| 393 | 551 | 1.69 | 97.0 | 19.90 | 0.027 | 2.02 |
| 394 | 162 | 1.21 | 89.6 | 1.81 | 0.012 | 0.53 |
| 395 | 665 | 5.63 | 416.0 | 5.41 | 0.015 | 0.93 |
| 396 | 636 | 3.14 | 230.0 | 3.65 | 0.013 | 0.61 |
| 397 | 456 | 1.29 | 81.4 | 9.01 | 0.013 | 0.41 |
| 398 | 205 | 0.78 | 69.6 | 2.27 | 0.004 | 0.32 |
| 399 | 479 | 1.94 | 90.3 | 13.80 | 0.041 | 1.37 |
| 400 | 284 | 1.66 | 108.0 | 6.77 | 0.033 | 1.44 |
| 401 | 316 | 1.00 | 90.2 | 3.94 | 0.025 | 0.69 |
| 402 | 322 | 0.84 | 67.2 | 6.51 | 0.021 | 0.70 |
| 403 | 317 | 3.08 | 142.0 | 3.60 | 0.029 | 0.86 |
| 404 | 212 | 1.18 | 76.4 | 2.40 | 0.027 | 0.61 |
| 405 | 447 | 4.93 | 136.0 | 10.80 | 0.045 | 1.15 |
| 406 | 259 | 1.76 | 99.0 | 3.35 | 0.082 | 1.01 |
| 407 | 265 | 1.82 | 150.0 | 3.87 | 0.034 | 1.44 |
| 408 | 229 | 1.27 | 125.0 | 2.95 | 0.043 | 1.25 |
| 409 | >1110 | 3.43 | 116.0 | 31.50 | 0.050 | 0.90 |
| 410 | 797 | 2.86 | 97.8 | 18.50 | 0.037 | 1.09 |
| 411 | 856 | 4.09 | 134.0 | 17.00 | 0.049 | 0.82 |
| 412 | 580 | 3.12 | 134.0 | 10.80 | 0.041 | 1.23 |
| 413 | 473 | 3.61 | 94.3 | 11.90 | 0.051 | 1.03 |
| 414 | 558 | 2.56 | 78.1 | 14.20 | 0.035 | 0.93 |
| 415 | 479 | 4.00 | 168.0 | 6.98 | 0.052 | 1.34 |
| 416 | 710 | 1.37 | 71.3 | 19.50 | 0.038 | 0.86 |
| 417 | 462 | 1.56 | 90.3 | 6.69 | 0.036 | 1.05 |
| 418 | 408 | 1.48 | 91.1 | 8.33 | 0.038 | 1.05 |
| 419 | 271 | 1.73 | 86.1 | 4.96 | 0.042 | 1.47 |
| 420 | 453 | 2.53 | 131.0 | 12.80 | 0.049 | 1.76 |
| 421 | 415 | 3.19 | 185.0 | 7.75 | 0.041 | 2.13 |
| 422 | 206 | 2.62 | 117.0 | 1.78 | 0.040 | 0.89 |
| 423 | 516 | 6.80 | 93.1 | 18.00 | 0.166 | 1.96 |
| 424 | 520 | 2.24 | 73.5 | 34.60 | 0.103 | 1.75 |
| 425 | 908 | 12.70 | 155.0 | 17.20 | 0.182 | 1.44 |
| 426 | 568 | 26.20 | 193.0 | 8.21 | 0.203 | 0.67 |
| 427 | 378 | 5.21 | 121.0 | 4.20 | 0.054 | 0.62 |
| 428 | 331 | 5.15 | 166.0 | 2.61 | 0.057 | 0.86 |
| 429 | 351 | 3.81 | 202.0 | 2.88 | 0.030 | 1.14 |
| 430 | 546 | 5.46 | 367.0 | 5.45 | 0.041 | 5.22 |
| 431 | 211 | 3.53 | 176.0 | 1.29 | 0.014 | 0.81 |
| 432 | 290 | 5.49 | 248.0 | 3.18 | 0.093 | 1.69 |
| 433 | 473 | 2.02 | 135.0 | 13.60 | 0.035 | 1.80 |
| 434 | 194 | 1.88 | 81.8 | 1.43 | 0.012 | 0.76 |
| 435 | 343 | 4.27 | 162.0 | 5.31 | 0.084 | 1.35 |
| 436 | 395 | 1.72 | 153.0 | 4.23 | 0.026 | 0.92 |
| 437 | 503 | 3.23 | 166.0 | 8.31 | 0.047 | 1.38 |
| 438 | 224 | 1.65 | 108.0 | 2.82 | 0.028 | 0.77 |
| 439 | 285 | 2.28 | 78.6 | 4.86 | 0.060 | 0.98 |
| 440 | 193 | 1.20 | 91.4 | 1.92 | 0.031 | 0.70 |
| 441 | >1150 | 5.47 | 318.0 | 66.80 | 0.044 | 3.53 |
| 442 | 808 | 3.87 | 202.0 | 23.50 | 0.026 | 1.16 |
| 443 | 726 | 1.61 | 168.0 | 34.20 | 0.027 | 1.49 |
| 444 | 299 | 3.72 | 108.0 | 4.88 | 0.049 | 0.97 |
| 445 | 548 | 5.25 | 242.0 | 22.50 | 0.066 | 2.68 |
| 446 | 332 | 8.30 | 158.0 | 3.91 | 0.053 | 0.76 |
| 447 | >1040 | 31.30 | 370.0 | 42.60 | 0.441 | 5.00 |
| 448 | 521 | 5.34 | 372.0 | 14.50 | 0.069 | 5.19 |
| 449 | >1170 | 8.61 | 554.0 | 49.70 | 0.236 | 22.20 |
| 450 | 317 | 10.80 | 217.0 | 2.45 | 0.123 | 1.45 |
| 453 | 692 | 3.81 | 135.0 | 18.80 | 0.093 | 1.09 |
| 455 | 420 | 8.17 | 122.0 | 9.42 | 0.225 | 1.91 |
| 456 | 289 | 2.65 | 87.3 | 6.13 | 0.045 | 0.95 |
| 457 | 849 | 2.15 | 115.0 | 33.20 | 0.038 | 1.38 |
| 458 | 293 | 1.96 | 61.5 | 3.69 | 0.048 | 0.96 |
| 459 | 518 | 2.72 | 159.0 | 23.90 | 0.090 | 3.28 |
| 460 | 397 | 9.59 | 93.6 | 8.26 | 0.215 | 1.39 |
| 461 | 316 | 9.02 | 154.0 | 3.81 | 0.137 | 1.20 |
| 462 | 595 | 2.57 | 102.0 | 11.70 | 0.052 | 0.97 |
| 463 | 615 | 2.32 | 110.0 | 19.70 | 0.034 | 1.40 |
| 464 | 658 | 6.18 | 296.0 | 6.54 | 0.073 | 1.07 |
| 465 | 433 | 2.29 | 169.0 | 2.62 | 0.034 | 0.93 |
| 467 | 351 | 2.10 | 132.0 | 3.93 | 0.092 | 1.21 |
| 470 | 302 | 3.09 | 134.0 | 9.16 | 0.178 | 2.13 |
| 471 | 499 | 3.53 | 180.0 | 6.58 | 0.184 | 1.85 |
| 472 | 387 | 1.37 | 129.0 | 7.01 | 0.105 | 1.29 |
| 473 | 460 | 2.85 | 198.0 | 4.20 | 0.070 | 1.10 |
| 474 | 297 | 1.18 | 89.7 | 2.17 | 0.058 | 0.45 |
| 475 | 344 | 1.28 | 157.0 | 6.38 | 0.122 | 1.18 |
| 476 | 616 | 1.41 | 191.0 | 7.29 | 0.061 | 1.21 |
| 477 | 342 | 1.74 | 129.0 | 2.25 | 0.027 | 0.54 |
| 478 | 183 | 0.77 | 112.0 | 1.60 (se = | 0.0949 (se = | 1.00 (se = |
| | | | | 0.0144, n = 2) | 0.0103, n = 2) | 0.0964, n = 2) |
| 494 | 240 | 3.75 | 98.8 | 2.67 | 0.062 | 0.73 |
| 495 | 308 | 4.34 | 110.0 | 2.82 | 0.083 | 0.77 |
| 496 | 223 | 4.87 | 96.3 | 2.52 | 0.131 | 0.67 |
| 497 | 234 | 4.74 | 117.0 | 1.99 | 0.050 | 0.88 |
| 498 | 270 | 3.33 | 128.0 | 1.46 | 0.037 | 0.73 |
| 499 | 449 | 4.20 | 129.0 | 4.88 | 0.042 | 1.01 |
| 500 | 1020 | 2.61 | 71.6 | 15.40 | 0.072 | 0.51 |
| 501 | 273 | 1.00 | 56.5 | 0.72 | 0.001 | 0.18 |
| 502 | 204 | 1.50 | 82.0 | 2.16 | 0.043 | 0.93 |
| 503 | 206 | 2.67 | 138.0 | 1.43 | 0.046 | 1.04 |
| 504 | 420 | 3.86 | 144.0 | 5.39 | 0.056 | 1.23 |
| 505 | 441 | 24.90 | 110.0 | 10.10 | 0.434 | 1.13 |
| 506 | >1200 | 17.70 | 186.0 | 34.10 | 0.280 | 1.27 |
| 507 | >1170 | 4.37 | 210.0 | 14.50 | 0.072 | 1.47 |
| 508 | 448 | 4.15 | 167.0 | 2.34 | 0.029 | 0.74 |
| 509 | 473 | 8.09 | 177.0 | 7.62 | 0.168 | 1.37 |
| 510 | 431 | 3.50 | 103.0 | 6.46 | 0.063 | 0.96 |
| 511 | 207 | 6.04 | 161.0 | 1.54 | 0.089 | 0.64 |
| 512 | 259 | 4.63 | 113.0 | 1.37 | 0.107 | 0.34 |
| 513 | 247 | 4.01 | 102.0 | 2.43 | 0.035 | 0.51 |
| 514 | 290 | 3.57 | 114.0 | 2.39 | 0.051 | 0.75 |
| 515 | 314 | 3.65 | 138.0 | 3.84 | 0.034 | 0.90 |
| 516 | 419 | 2.40 | 87.0 | 4.75 | 0.006 | 0.58 |
| 517 | 152 | 2.20 | 118.0 | 1.34 | 0.028 | 0.34 |
| 518 | 241 | 1.57 | 61.9 | 2.12 | 0.005 | 0.26 |
| 519 | 265 | 1.62 | 99.0 | 4.22 | 0.031 | 0.91 |
| 520 | 275 | 3.25 | 51.9 | 5.64 | 0.044 | 0.37 |
| 521 | 284 | 1.08 | 68.4 | 5.10 | 0.024 | 0.72 |
| 522 | 707 | 5.08 | 102.0 | 10.50 | 0.004 | 0.26 |
| 523 | 363 | 3.41 | 102.0 | 5.34 | 0.045 | 0.68 |
| 524 | 334 | 2.02 | 86.4 | 5.22 | 0.025 | 0.76 |
| 525 | 648 | 2.85 | 124.0 | 17.50 | 0.039 | 1.11 |
| 526 | 546 | 6.92 | 122.0 | 15.80 | 0.126 | 0.89 |
| 527 | >1010 | 2.39 | 102.0 | 20.50 | 0.045 | 0.90 |
| 528 | 311 | 4.17 | 91.1 | 4.40 | 0.085 | 0.96 |
| 529 | 193 | 1.45 | 42.9 | 1.08 | 0.019 | 0.23 |
| 530 | 415 | 0.67 | 22.5 | 3.93 | 0.012 | 0.09 |
| 531 | 327 | 1.65 | 48.9 | 5.16 | 0.024 | 0.58 |
| 532 | 141 | 2.14 | 78.5 | 1.62 | 0.035 | 0.76 |
| 533 | 313 | 0.98 | 60.0 | 5.67 | 0.021 | 0.59 |
| 534 | 918 | 1.19 | 43.5 | 45.10 | 0.025 | 0.46 |
| 535 | 487 | 1.68 | 88.6 | 14.90 | 0.028 | 1.38 |
| 536 | 123 | 0.37 | 13.2 | 0.64 | 0.002 | 0.06 |
| 484 | 456 | 3.09 | 108.0 | 7.58 | 0.044 | 0.96 |
| 537 | 268 | 2.43 | 124.0 | 3.32 | 0.025 | 0.74 |
| 485 | 334 | 3.64 | 91.6 | 7.53 | 0.041 | 0.94 |
| 486 | 420 | 1.72 | 72.4 | 8.27 | 0.019 | 1.02 |
| 487 | 664 | 3.87 | 213.0 | 41.00 | 0.174 | 5.57 |
| 538 | 399 | 2.36 | 69.4 | 8.04 | 0.044 | 1.03 |
| 539 | 363 | 2.19 | 57.7 | 12.20 | 0.066 | 0.83 |
| 540 | 197 | 1.53 | 44.5 | 6.60 | 0.064 | 1.15 |
| 541 | 487 | 1.66 | 77.7 | 20.00 | 0.111 | 2.51 |
| 542 | 289 | 2.04 | 61.1 | 6.68 | 0.093 | 1.39 |
| 543 | 397 | 2.09 | 74.1 | 12.00 | 0.094 | 1.23 |
| 544 | 619 | 1.91 | 72.3 | 24.40 | 0.127 | 1.31 |
| 545 | 403 | 2.52 | 78.1 | 48.10 | 0.118 | 1.43 |
| 546 | 360 | 2.56 | 86.9 | 16.00 | 0.077 | 1.62 |
| 486 | 664 | 3.87 | 213 | 41.0 | 0.174 | 5.57 |
| 550 | 280 | 1.31 | 44.2 | 12.90 | 0.018 | 1.17 |
| 551 | 171 | 0.99 | 33.3 | 8.88 | 0.046 | 1.05 |
| 552 | 129 | 1.21 | 31.6 | 3.34 | 0.017 | 0.89 |
| 554 | 790 | 4.24 | 172.0 | 10.60 | 0.163 | 1.65 |
| 555 | 312 | 2.66 | 98.1 | 6.99 | 0.054 | 0.84 |

### Plasma Levels of Example Compounds in Rats

[0556] Plasma levels of example compounds were determined in male Sprague Dawley rats. The animals were purchased from Envigo (Indiana, USA) at 8-9 weeks of age. After acclimation, the rats were randomized. Each group (n=5) received one compound at 10 nmol/kg through subcutaneous (sc) injection. Blood samples were serially collected through tail vein at the points in time indicated in each table. The animal studies were approved by Lilly Institutional Animal Care and Use Committee (IACUC).

[0557] The plasma was prepared from collected blood samples. Each plasma sample was serially diluted using compound dilution medium and then incubated with HEK293 cells expressing human GLP1R and cAMP-driving luciferase in 96 well plates for 5 hours. The cells were lysed and luminescence signal intensity measured after Bio-Glo (Promega) was added.

[0558] For each test compound, a mathematical equation calculating corresponding concentration of a luminescence signal value was established through non-linear regression analysis (Graphpad Prism) of standard dose-luminescence signal curve data. Using the mathematic equation we converted luminescence data showing dose-dependency in each set of serially diluted samples to concentration and averaged the values as plasma concentration of the sample. The data presented in Table 6 are mean±SE of the averaged values from five rats. As seen in Table 6, the tested example compounds remained in plasma for extended periods of time, including in some cases for at least 28 days.

TABLE 6
Plasma levels (nM) of example compounds in rats.

| Compound | 24 h | 72 h | 168 h | 240 h | 312 h | 336 h | 480 h | 504 h | 672 h |
|---|---|---|---|---|---|---|---|---|---|
| 136 | 32.4 ± 3.3 | | 70.2 ± 2.9 | | | 37.2 ± 3.9 | | 18.1 ± 2.6 | 2.6 ± 1.4 |
| 172 | 82.9 ± 7.4 | | 76.0 ± 2.7 | | | 35.4 ± 2.3 | | 21.5 ± 3.1 | 6.8 ± 1.9 |
| 164 | | 44.6 ± 3.3 | 59.5 ± 3.2 | | | 30.8 ± 1.9 | | 20.8 ± 3.1 | 11.5 ± 3.9 |
| 170 | | 51.9 ± 3.2 | 54.0 ± 4.2 | | | 26.8 ± 3.0 | | 17.9 ± 5.1 | 9.3 ± 3.8 |
| 243 | 13.4 ± 2.8 | 12.1 ± 1.0 | 1.3 ± 0.2 | 7.5 ± 2.1 | | 0.3 ± 0.2 | | 0.1 ± 0.1 | 0.1 ± 0 |
| 1 | 73.3 ± 21.1 | 68.6 ± 3.0 | 46.7 ± 5.6 | 100.7 ± 19.6 | | 40.2 ± 4.9 | | 37.2 ± 5.2 | 20.3 ± 5.0 |
| 38 | 39.4 ± 4.5 | 64.7 ± 2.6 | 38.9 ± 1.4 | | | 47.2 ± 3.5 | | 16.8 ± 1.6 | 12.5 ± 1.6 |
| 266 | 25.8 ± 4.1 | 45.9 ± 3.0 | 23.2 ± 2.1 | | | 29.4 ± 2.1 | | 24.0 ± 4.0 | 10.1 ± 2.5 |
| 1 | | 88.7 ± 6.1 | 71.3 ± 4.9 | 96.0 ± 13.1 | | | | | 31.7 ± 2.7 |
| 3 | 70.4 ± 6.9 | 134.4 ± 7.6 | 90.9 ± 7.7 | 49.9 ± 9.1 | | 59.9 ± 8.2 | | 28.7 ± 2.4 | 52.7 ± 7.8 |
| 10 | 63.8 ± 5.2 | 98.4. ± 8.8 | 85.7 ± 6.5 | 42.0 ± 4.3 | | 52.3 ± 5.9 | | 32.2 ± 2.3 | 31.7 ± 6.0 |
| 2 | 51.8 ± 6.3 | 124.1 ± 10.9 | 47.2 ± 3.4 | 53.3 ± 7.2 | | 98.3 ± 10.0 | | 81.0 ± 14.1 | 22.0 ± 2.1 |
| 15 | 85.6 ± 12.6 | 103.8 ± 8.4 | 85.5 ± 4.3 | 46.8 ± 2.0 | | 19.6 ± 6.3 | | 50.2 ± 11.6 | 24.7 ± 3.0 |
| 18 | 88.2 ± 9.8 | 144.7 ± 10.5 | 58.2 ± 5.5 | 41.1 ± 4.1 | | 51.0 ± 7.9 | | 64.4 ± 7.8 | 25.5 ± 2.3 |
| 345 | | 58.1 ± 11.3 | 53.8 ± 11.0 | | | 42.1 ± 10.1 | | | 14.3 ± 3.5 |
| 260 | 37.2 ± 2.7 | | 43.6 ± 1.7 | 38.2 ± 3.5 | | 19.1 ± 1.8 | | 19.7 ± 5.1 | 5.5 ± 2.2 |
| 47 | 46.0 ± 6.1 | | 35.4 ± 2.1 | | 30.2 ± 4.3 | | 10.5 ± 2.4 | | 7.4 ± 2.2 |
| 158 | 33.1 ± 3.3 | | 54.4 ± 1.1 | | 5.3 ± 5.2 | | 0 | | 0 |
| 168 | 31.8 ± 1.4 | | 54.2 ± 5.8 | | 24.9 ± 7.3 | | 1.5 ± 1.3 | | 0 |
| 169 | 30.8 ± 4.0 | | 62.2 ± 5.8 | | 20.0 ± 5.1 | | 0.1 ± 0 | | 0 |
| 185 | 30.8 ± 5.3 | | 64.4 ± 6.7 | | 5.9 ± 4.3 | | 0.5 ± 0.4 | | 0 |
| 188 | 24.9 ± 3.1 | | 40.0 ± 4.4 | | 24.8 ± 5.8 | | 0.1 ± 0.0 | | 0.0 ± 0.0 |
| 147 | | | 72.3 ± 6.1 | | | 35.6 ± 2.5 | | 2.4 ± 2.3 | 1.5 ± 1.5 |
| 183 | | | 95.5 ± 2.4 | | | 24.5 ± 6.9 | | 0.9 ± 0.6 | 0 ± 0 |
| 184 | | | 61.1 ± 10.1 | | | 19.3 ± 9.1 | | 7.1 ± 4.5 | 4.5 ± 2.7 |
| 187 | | | 60.6 ± 3.1 | | | 10.3 ± 3.2 | | 1.8 ± 1.1 | 0.1 ± 0.1 |
| 204 | | | 82.5 ± 7.2 | | | 21.3 ± 2.1 | | 5.2 ± 2.4 | 2.0 ± 1.7 |
| 483 | | 98.1 ± 5.3 | 71.4 ± 2.5 | | | 57.3 ± 7.2 | | 42.1 ± 7.2 | 16.3 ± 2.3 |
| 129 | 24.5 ± 2.7 | | 63.9 ± 7.7 | | | 27.0 ± 1.7 | | 11.4 ± 4.5 | 2.3 ± 1.4 |
| 136 | 32.4 ± 3.3 | | 70.2 ± 2.9 | | | 37.2 ± 3.9 | | 18.1 ± 2.6 | 2.6 ± 1.4 |
| 173 | | 51.9 ± 3.2 | 42.9 ± 3.5 | | | 24.8 ± 1.2 | | 8.6 ± 2.6 | 3.1 ± 1.1 |
| 185 | 30.8 ± 5.3 | | 64.4 ± 6.7 | | 5.9 ± 4.3 | | 0.5 ± 0.4 | | 0 |
| 188 | 24.9 ± 3.2 | | 40.0 ± 4.4 | | 24.8 ± 5.8 | | 0.1 ± 0 | | 0 |
| 480 | 43.0 ± 11.6 | | 45.8 ± 12.0 | | | 29.4 ± 8.1 | | 15.8 ± 4.3 | 10.4 ± 2.8 |
| 467 | 78.6 ± 6.1 | | | | | 9.6 ± 1.3 | | 3.6 ± 0.6 | 1.5 ± 0.4 |
| 387 | 43.4 ± 12.0 | 55.6 ± 12.5 | 46.7 ± 11.2 | 25.9 ± 3.5 | | 15.9 ± 3.4 | | 7.5 ± 2.1 | 3.3 ± 0.7 |
| 403 | | 90.0 ± 4.1 | 53.1 ± 1.0 | | 24.7 ± 1.0 | | | 5.8 ± 1.9 | 1.1 ± 0.4 |
| 413 | | 59.5 ± 5.7 | | 28.0 ± 2.2 | | | | 3.5 ± 0.5 | 3.4 ± 0.6 |
| 433 | | 86.2 ± 4.7 | | 37.3 ± 3.2 | | | | 10.8 ± 1.1 | 9.1 ± 0.9 |
| 435 | | 82.6 ± 2.9 | | 26.0 ± 2.9 | | 19.9 ± 1.8 | | | 1.7 ± 0.4 |
| 444 | | 55.9 ± 4.1 | | 23.3 ± 3.0 | | 11.5 ± 1.5 | | | 0.4 ± 0.2 |
| 456 | | 94.3 ± 5.0 | 58.9 ± 3.1 | | 20.4 ± 1.1 | | | 5.4 ± 0.5 | 1.9 ± 0.3 |
| 484 | 23.7 ± 5.0 | | 69.9 ± 7.9 | | | 28.0 ± 1.6 | | 10.2 ± 2.7 | 2.3 ± 0.2 |
| 485 | | 102.3 ± 12.3 | 66.6 ± 8.8 | | | 27.5 ± 4.0 | | 6.0 ± 1.3 | 3.9 ± 2.4 |

### Pharmacokinetic (PK) Studies

[0559] PK studies of certain exemplary compounds are conducted in Cynomolgus monkeys and DIO mice. Plasma concentrations of compounds for these studies are determined using an ELISA method or LC/MS methods, described in more detail below.

### Bioanalytical Methods—ELISA

[0560] Plasma concentrations of certain compounds were determined by an ELISA method. Pierce Streptavidin coated plates (Thermo Scientific cat #15500) were coated using biotinylated ELI299 2G5 Antibody (Lilly generated Antibody lot #2G5—22 Aug. 2023). This coating antibody was diluted in Bicarbonate buffer pH 9.6 (Thermo Scientific cat #: 28382) to a final concentration of 1 μg/mL and added to the plate at 100 μl/well and stored overnight at 2-8° C. Following overnight incubation, the plates were then washed using TBS-Tween wash buffer (TEKNOVA Cat #: T0310). All wash steps use the same wash buffer and are carried out by washing the plate 4× using 300 μl/well of wash buffer with a shake step between each wash. Following each wash step, the plate is tapped on a paper towel to remove any excess wash buffer. Following the wash step, the coated and washed plate is then blocked using “Blocking and Assay buffer” for this assay (Casein in PBS buffer with additional Tween-20). Casein buffer—Thermo Scientific cat #37528 was supplemented by adding Tween-20 to a final concentration of 0.05%. This buffer was used as the blocking and assay buffer for the assay. Blocking was done using 200 μl/well of blocking buffer and stored at ambient temperature for approximately 1 hour with shaking at 500 RPM. During blocking, standards, quality control samples, and study samples were processed through MRD (Minimum Required Dilution) of 1:20 (monkey) or 1:50 (mouse) in assay buffer and any additional sample dilutions as needed. After blocking, plate was washed, and the processed samples were then added to the plates at 100 μl/well. The plate with samples is then stored at ambient temperature for approximately 1 hour with shaking at 500 RPM. Detection reagent is Mouse Anti-Human IgG4 Fc-HRP antibody (Southern Biotech cat #9040-05). The detection reagent is diluted in assay buffer to a final concentration of 0.017 μg/mL. Following the sample incubation, the plate is washed and incubated with detection solution at 100 μl/well. The plate with detection reagent is then stored at ambient temperature for approximately 1 hour with shaking at 500 RPM. During detection incubation, the detection substrate solution is prepared by mixing equal parts of KPL TMB Peroxidase Substrate (KPL cat #: 5120-0048) and KPL Peroxidase Substrate solution B (KPL cat #: 5120-0037). Following detection reagent incubation, the plate is washed, and detection substrate is added at 100 μl/well volume and incubated for 7-8 minutes until color develops. The reaction is then stopped using a TMB Stop solution (KPL cat #: 5150-0019). The plate is then read using a plate reader at wavelength 450 nm with a 630 nm correction.

### Bioanalytical Methods—LC/MS

[0561] Plasma concentrations of compounds were determined by LC/MS methods. Surrogate peptides for the incretin and Fc subunits of the analyte were used as a measure of plasma concentrations. For each assay, aliquots (95 μL) of diluted study samples, blanks, and standards in 100% cyno plasma were transferred to a PCR plate (Thermo Scientific 0.2 mL Non-Skirted, 96 Well PCR Plates, Cat #AB-0600). The analytes were immunoprecipitated with a biotin-labeled anti-human IgG antibody (Southern Biotech Goat Anti-Human IgG, Monkey ads-BIOT, Cat #2049-08) pre-conjugated to streptavidin-coated magnetic beads (100 μL). The samples, blanks, and standards were washed once with 1×TBST and once with 1×TBS before being eluted in 0.2% formic acid (100 μL). The eluant (95 μL) was transferred to a new plate containing Internal Standards analogous to the incretin and Fc subunits (5 μL of each) and dried under nitrogen on a SPE Dual Dry at 60 degrees Celsius. Once dry, samples, blanks, and standards were reconstituted in 500 mM ammonium carbonate (30 μL) and reduced and alkylated in acetonitrile containing 2% iodoethanol and 1% triethylphosphine (30 μL) for one hour at 40 degrees Celsius, shaking at 600 rpm. Samples, blanks, and standards were dried a second time under nitrogen on an SPE Dual Dry at 60 degrees Celsius before being reconstituted in 50 mM Ammonium Bicarbonate containing 10% methanol and Glu-C Endoproteinase (95 μL) and digested overnight (˜18 hours) at 37 degrees Celsius, shaking at 600 rpm. The reaction was quenched with 88% formic acid (5 μL) and injected for analysis (20 μL) on an Analytical Sales Sprite Armor C18 column (2.1×80 mm, 5 μm). Analyte and Internal Standard surrogate peptides were delivered to a Thermo Fisher Orbitrap Eclipse Tribrid mass spectrometer in 0.1% formic acid in water and 0.1% formic acid in acetonitrile at 400 μL/min. The surrogate peptides were measured by positive mode full scan FT-MS for quantification.

### Pharmacokinetics in Cynomolgus Monkeys

[0562] Male Cynomolgus monkeys were administered a single subcutaneous dose (10 nmol/kg) of compound in 40 mM Tris pH 8 Buffer at a volume of 0.5 mL/kg. Blood was collected from each animal at 6, 24, 48, 72, 96, 120, 168, 240, 288, 336, 408, 576, 672, 2352, 3024, and 4200 hours post dose for pharmacokinetic characterization.

[0563] Male Cynomolgus monkeys were administered a single intravenous or subcutaneous dose (10 nmol/kg) of compound in 40 mM Tris pH 8 Buffer at a volume of 0.5 mL/kg. Blood was collected from each animal at 6, 24, 48, 72, 96, 168, 240, 288, 336, 408, 480, 576, 672, 840, 1008, 1176, 1344, and 1512 hours post dose for pharmacokinetic characterization.

[0564] Female Cynomolgus monkeys were administered a single intravenous or subcutaneous dose (10 nmol/kg) of compound in 40 mM Tris pH 8 Buffer at a volume of 0.5 mL/kg. Blood was collected from each animal at 0.25 (IV only), 6, 24, 48, 72, 96, 168, 240, 288, 336, 408, 480, 576, 672, 840, 1008, 1176, 1344, 1512, 1680, 1848, and 2016 hours post dose for pharmacokinetic characterization.

TABLE 7
Individual and mean pharmacokinetic (PK) parameters following a
single subcutaneous dose to male and female cynomolgus monkeys

| Compound | T_{1/2} | Tmax | Cₘₐₓ | AUC_{0-inf} | CL/F |
|---|---|---|---|---|---|
| (Dose) | (hr) | (hr) | (nmole/L) | (hr*nmole/L) | (mL/hr/kg) |
| Compound 1 | 481 | 168 | 207 | 205347 | 0.049 |
| (10 nmol/kg) | 505 | 168 | 199 | 185833 | 0.054 |
| | 493 | 168 | 203 | 195590 | 0.051 |
| Compound 266 | NC | 240 | 128 | NC | NC |
| (10 nmol/kg) | NC | 72 | 108 | NC | NC |
| | NC | 156 | 118 | NC | NC |
| Compound 32 | NC | 168 | 247 | NC | NC |
| (10 nmol/kg) | NC | 168 | 293 | NC | NC |
| | NC | 168 | 270 | NC | NC |
| Compound 170 | 800 | 336 | 233 | 226000 | 0.044 |
| (10 nmol/kg) | 621 | 96 | 221 | 188000 | 0.053 |
| | 711 | 216 | 227 | 207000 | 0.049 |
| Compound 164 | 421 | 168 | 179 | 139000 | 0.072 |
| (10 nmol/kg) | 507 | 168 | 214 | 190000 | 0.053 |
| | 464 | 168 | 197 | 165000 | 0.062 |
| Compound 172 | 585 | 168 | 186 | 199000 | 0.050 |
| (10 nmol/kg) | 508 | 168 | 256 | 189000 | 0.053 |
| | 547 | 168 | 221 | 194000 | 0.052 |
| Compound 136 | 446 | 240 | 258 | 153000 | 0.065 |
| (10 nmol/kg) | 416 | 288 | 350 | 161000 | 0.062 |
| | 431 | 264 | 304 | 157000 | 0.064 |
| Compound 336 | NC | 48 | 174 | NC | NC |
| (10 nmol/kg) | NC | 120 | 179 | NC | NC |
| | NC | 84 | 177 | NC | NC |
| Compound 387 | 362 | 96 | 93.8 | 65400 | 0.153 |
| (10 nmol/kg) | 315 | 96 | 111 | 46200 | 0.216 |
| | 339 | 96 | 102 | 55800 | 0.185 |
| Compound 456 | 43.6 | 96 | 189 | 81000 | 0.123 |
| (10 nmol/kg) | 93.9 | 96 | 177 | 75500 | 0.132 |
| | 68.8 | 96 | 183 | 78300 | 0.128 |

Abbreviations: AUC_{0-inf} = area under the curve from time 0 hours to infinity; CL/F = clearance/bioavailability; Tₘₐₓ = time to maximum concentration; Cₘₐₓ = maximum observed plasma concentration; T_{1/2} = half-life; NC = not calculated.

TABLE 8
Individual and Mean Pharmacokinetic Parameters Following a Single
Intravenous Dose to Male and Female Cynomolgus Monkeys

| Compound | T_{1/2} | Cₘₐₓ | AUC₀₋ᵢₙₜ | CL |
|---|---|---|---|---|
| (Dose) | (hr) | (nmole/L) | (hr*nmole/L) | (mL/hr/kg) |
| Compound 266 | 501 | 195 | 117000 | 0.086 |
| (10 nmol/kg) | 504 | 143 | 133000 | 0.075 |
| | 503 | 169 | 125000 | 0.080 |
| Compound 336 | 165 | 312 | 133000 | 0.075 |
| (10 nmol/kg) | 29.1 | 322 | 44200 | 0.226 |
| | 97.1 | 317 | 88600 | 0.151 |
| Compound 170 | 306 | 373 | 119000 | 0.084 |
| (10 nmol/kg) | 763 | 449 | 251000 | 0.040 |
| | 535 | 411 | 185000 | 0.062 |
| Compound 164 | 346 | 357 | 128000 | 0.078 |
| (10 nmol/kg) | 439 | 395 | 138000 | 0.073 |
| | 393 | 376 | 133000 | 0.075 |

Abbreviations: AUC_{0-inf} = area under the curve from time 0 hours to infinity, CL = clearance, Cₘₐₓ = maximum observed plasma concentration, T_{1/2} = half-life

[0565] As seen in Tables 7-8, the PK profiles in example compounds support a prolonged elimination half-life and decreased clearance compared to currently available incretin therapies. These data demonstrate that the above compounds have a pharmacokinetic profile potentially suitable for once monthly administration.

### Pharmacodynamics in DIO Mice

[0566] The in vivo efficacy of certain example compounds on body weight was determined in a diet-induced mouse model of obesity (DIO). Male C57BL/6 DIO mice (The Jackson Laboratory, Bar Harbor, ME) maintained on a calorie-rich diet (containing 40% kcal from fat) were used in the following studies. Mice were individually housed in a temperature-controlled facility (24° C.) with 12-hour light/dark cycle (lights on 22:00) and ad libitum access to food and water. To examine the effect on body weight, obese mice received one subcutaneous dose of vehicle (40 mM Tris-HCl at pH 8.0), or test article (3, 10 and 30 nmol/kg). Body weight and food intake were monitored daily for the first 14 days and then twice weekly for the remainder of the study. Consistent with the desired long duration of action, treatment of obese animals with a single dose of each example compound produced sustained weight loss.

TABLE 9
Body weight change (%) after receiving one subcutaneous dose of each
evaluated compound at the indicated dosages (nmol/kg) in diet-induced
obese mice. Data are presented as mean ± SEM, n = 5 animals
per group. Statistical analysis was performed using a two-way ANOVA,
followed by a Dunnett's method for multiple comparisons.

| | | Day 3 | Day 7 | Day 14 | Day 21 |
|---|---|---|---|---|---|
| | Dose | Weight | Weight | Weight | Weight |
| Compound | (nmol/kg) | Loss (%) | Loss (%) | Loss (%) | Loss (%) |
| 243 | 3 | 10.12 ± 0.71 | 10.92 ± 1.00 | 6.30 ± 0.86 | 3.52 ± 2.06 |
| 243 | 10 | 12.34 ± 0.30 | 14.76 ± 1.19 | 9.68 ± 1.91 | 4.44 ± 1.68 |
| 1 | 10 | 5.76 ± 0.84 | 10.12 ± 0.84 | 10.28 ± 1.28 | 7.72 ± 1.77 |
| 1 | 30 | 9.38 ± 0.60 | 11.12 ± 1.19 | 9.82 ± 1.27 | 8.76 ± 0.96 |
| 2 | 10 | 7.42 ± 0.47 | 13.58 ± 0.92 | 15.08 ± 0.95 | 12.28 ± 1.13 |
| 3 | 10 | 6.52 ± 0.72 | 10.82 ± 0.82 | 12.90 ± 0.55 | 9.52 ± 0.42 |
| 10 | 10 | 8.10 ± 0.80 | 13.68 ± 1.47 | 14.98 ± 0.95 | 11.34 ± 1.04 |
| 1 | 10 | 7.76 ± 1.16 | 9.82 ± 1.16 | 11.00 ± 2.60 | 5.94 ± 2.57 |
| 8 | 10 | 5.00 ± 1.09 | 5.28 ± 1.47 | 5.66 ± 1.80 | 0.58 ± 1.46 |
| 12 | 10 | 6.44 ± 1.16 | 8.34 ± 1.59 | 7.76 ± 1.97 | 2.30 ± 2.45 |
| 13 | 10 | 8.6 ± 0.54 | 11.32 ± 1.40 | 11.75 ± 1.11 | 6.67 ± 1.24 |
| 14 | 10 | 7.34 ± 0.92 | 8.54 ± 1.19 | 8.16 ± 1.55 | 3.04 ± 2.16 |
| 15 | 10 | 9.88 ± 0.77 | 14.02 ± 2.07 | 11.14 ± 1.20 | 4.44 ± 1.11 |
| 16 | 10 | 9.72 ± 0.51 | 13.42 ± 1.57 | 12.1 ± 1.22 | 7.04 ± 1.00 |
| 18 | 10 | 9.68 ± 0.75 | 13.40 ± 2.58 | 12.98 ± 3.22 | 6.84 ± 2.50 |
| 19 | 10 | 9.66 ± 0.61 | 13.08 ± 2.38 | 12.70 ± 1.58 | 6.50 ± 0.86 |
| 20 | 10 | 9.66 ± 0.68 | 12.82 ± 0.94 | 12.02 ± 1.19 | 5.78 ± 1.06 |
| 22 | 10 | 11.42 ± 0.54 | 18.68 ± 1.10 | 19.62 ± 1.03 | 13.70 ± 3.07 |
| 23 | 10 | 7.60 ± 0.75 | 9.40 ± 0.43 | 8.54 ± 0.92 | 3.34 ± 1.71 |
| 28 | 10 | 8.52 ± 1.14 | 11.14 ± 1.52 | 11.20 ± 1.61 | 6.16 ± 2.04 |
| 29 | 10 | 8.52 ± 0.64 | 12.32 ± 1.38 | 12.04 ± 2.13 | 6.04 ± 1.79 |
| 30 | 10 | 7.48 ± 0.98 | 9.88 ± 1.17 | 10.06 ± 1.38 | 5.02 ± 1.38 |
| 31 | 10 | 7.80 ± 0.89 | 9.76 ± 0.97 | 9.22 ± 1.84 | 4.34 ± 2.15 |
| 38 | 10 | 6.66 ± 0.99 | 9.06 ± 1.47 | 7.78 ± 1.71 | 1.52 ± 1.66 |
| 1 | 10 | 2.62 ± 1.30 | 3.26 ± 1.37 | 3.88 ± 1.36 | 2.54 ± 1.60 |
| 1 | 30 | 8.40 ± 0.87 | 10.04 ± 1.73 | 12.26 ± 2.25 | 13.5 ± 3.28 |
| 32 | 10 | 10.88 ± 0.88 | 18.70 ± 2.98 | 22.06 ± 3.87 | 20.34 ± 3.22 |
| 33 | 10 | 8.24 ± 1.09 | 12.52 ± 2.42 | 13.38 ± 3.05 | 10.18 ± 3.30 |
| 40 | 10 | 8.78 ± 1.28 | 12.96 ± 2.39 | 14.18 ± 2.95 | 11.06 ± 3.23 |
| 52 | 10 | 9.88 ± 0.73 | 14.70 ± 2.83 | 14.26 ± 2.77 | 11.56 ± 2.24 |
| 1 | 30 | 8.63 ± 0.59 | 10.28 ± 1.04 | 8.96 ± 1.06 | 6.42 ± 1.48 |
| 46 | 10 | 13.16 ± 1.02 | 27.08 ± 2.68 | 27.52 ± 3.11 | 19.60 ± 2.06 |
| 47 | 10 | 9.24 ± 0.45 | 24.12 ± 0.33 | 27.76 ± 2.03 | 21.06 ± 2.07 |
| 48 | 10 | 10.44 ± 0.92 | 20.52 ± 2.89 | 22.84 ± 3.74 | 14.22 ± 3.96 |
| 260 | 10 | 6.94 ± 1.12 | 14.00 ± 4.38 | 16.52 ± 6.24 | 10.90 ± 4.43 |
| 251 | 10 | 12.80 ± 0.93 | 22.18 ± 2.77 | 22.76 ± 1.83 | 14.86 ± 3.16 |
| 97 | 10 | 13.70 ± 0.51 | 27.48 ± 2.04 | 26.48 ± 1.48 | 18.30 ± 0.92 |
| 98 | 10 | 13.48 ± 0.72 | 28.14 ± 0.47 | 30.7 ± 2.55 | 22.40 ± 2.88 |
| 99 | 10 | 13.38 ± 0.33 | 27.38 ± 1.88 | 27.34 ± 2.45 | 19.56 ± 2.04 |
| 1 | 30 | 8.62 ± 0.59 | 10.28 ± 10.04 | 8.96 ± 1.06 | 6.42 ± 1.48 |
| 32 | 3 | 4.56 ± 0.89 | 7.78 ± 1.06 | 9.66 ± 0.84 | 6.86 ± 2.38 |
| 32 | 10 | 8.22 ± 0.35 | 20.16 ± 1.90 | 21.36 ± 2.42 | 16.58 ± 1.95 |
| 266 | 3 | 4.16 ± .74 | 9.46 ± 1.36 | 10.78 ± 0.97 | 10.14 ± 0.97 |
| 266 | 10 | 8.14 ± 0.82 | 19.76 ± 2.17 | 24.32 ± 3.60 | 18.60 ± 2.07 |
| 47 | 1 | 6.06 ± 0.55 | 8.92 ± 1.08 | 7.48 ± 0.93 | 5.76 ± 1.54 |
| 97 | 1 | 5.04 ± 0.54 | 10.00 ± 2.07 | 8.68 ± 2.36 | 7.02 ± 2.33 |
| 32 | 3 | 5.52 ± 0.44 | 8.74 ± 0.35 | 11.99 ± 1.38 | 10.93 ± 1.59 |
| 310 | 3 | 7.04 ± 0.58 | 12.71 ± 1.86 | 12.81 ± 1.48 | 10.72 ± 1.85 |
| 311 | 3 | 7.30 ± 0.49 | 12.94 ± 0.79 | 14.35 ± 1.10 | 10.47 ± 1.28 |
| 147 | 3 | 8.62 ± 0.33 | 12.56 ± 0.60 | 14.48 ± 1.18 | 9.77 ± 1.73 |
| 312 | 3 | 8.02 ± 0.21 | 15.29 ± 1.81 | 17.50 ± 1.47 | 13.07 ± 1.00 |
| 313 | 3 | 9.02 ± 0.28 | 17.14 ± 0.63 | 19.42 ± 0.96 | 14.46 ± 1.29 |
| 161 | 3 | 5.86 ± 0.65 | 9.92 ± 1.29 | 12.10 ± 1.23 | 8.72 ± 1.83 |
| 314 | 3 | 6.48 ± 0.30 | 9.27 ± 1.03 | 10.91 ± 1.27 | 7.45 ± 1.41 |
| 100 | 10 | 7.12 ± 0.71 | 14.30 ± 1.96 | 15.66 ± 3.28 | 11.88 ± 2.66 |
| 132 | 10 | 10.94 ± 0.69 | 13.68 ± 0.91 | 11.40 ± 1.57 | 6.34 ± 0.97 |
| 133 | 3 | 10.86 ± 0.68 | 14.5 ± 1.15 | 13.12 ± 2.16 | 6.42 ± 2.00 |
| 133 | 10 | 11.62 ± 0.62 | 20.14 ± 1.67 | 19.74 ± 1.41 | 12.90 ± 0.44 |
| 139 | 10 | 11.70 ± 0.46 | 16.78 ± 1.38 | 15.98 ± 1.05 | 9.98 ± 1.36 |
| 147 | 10 | 13.38 ± 0.25 | 23.44 ± 0.81 | 25.70 ± 1.44 | 18.74 ± 1.15 |
| 148 | 3 | 11.24 ± 0.67 | 13.06 ± 0.56 | 12.12 ± 0.95 | 6.00 ± 0.67 |
| 148 | 10 | 13.36 ± 0.18 | 22.72 ± 1.06 | 21.40 ± 1.78 | 13.64 ± 1.32 |
| 305 | 3 | 10.60 ± 0.63 | 13.22 ± 0.83 | 10.84 ± 0.86 | 5.54 ± 1.00 |
| 305 | 10 | 11.30 ± 0.25 | 15.78 ± 0.95 | 13.72 ± 0.86 | 7.88 ± 0.93 |
| 481 | 10 | 10.98 ± 0.64 | 13.32 ± 0.32 | 10.44 ± 0.93 | 6.50 ± 0.55 |
| 32 | 10 | 11.99 ± 0.85 | 24.61 ± 3.20 | 25.59 ± 2.83 | 19.19 ± 2.11 |
| 46 | 3 | 6.67 ± 0.91 | 9.72 ± 0.89 | 10.74 ± 0.68 | 8.67 ± 0.95 |
| 47 | 3 | 9.22 ± 0.84 | 12.83 ± 1.06 | 12.74 ± 0.93 | 8.52 ± 1.38 |
| 98 | 3 | 8.33 ± 0.66 | 11.19 ± 0.70 | 12.72 ± 1.27 | 9.23 ± 1.19 |
| 101 | 3 | 9.08 ± 0.71 | 13.33 ± 1.41 | 13.33 ± 1.14 | 9.96 ± 0.43 |
| 167 | 3 | 10.26 ± 0.66 | 14.52 ± 1.01 | 14.31 ± 1.56 | 9.08 ± 2.52 |
| 181 | 3 | 9.82 ± 0.84 | 15.99 ± 2.90 | 12.55 ± 3.86 | 8.02 ± 3.67 |
| 183 | 3 | 10.40 ± 0.95 | 15.87 ± 2.89 | 16.01 ± 1.95 | 11.24 ± 0.94 |
| 184 | 3 | 8.64 ± 0.94 | 11.92 ± 1.30 | 13.16 ± 1.83 | 8.79 ± 2.43 |
| 185 | 3 | 10.76 ± 0.82 | 16.28 ± 1.28 | 19.70 ± 1.90 | 15.48 ± 2.39 |
| 186 | 3 | 9.84 ± 0.33 | 14.56 ± 0.77 | 14.98 ± 0.82 | 10.76 ± 0.43 |
| 187 | 3 | 10.51 ± 0.50 | 15.19 ± 2.74 | 16.54 ± 3.51 | 11.04 ± 3.09 |
| 188 | 3 | 10.48 ± 0.52 | 17.94 ± 3.13 | 20.31 ± 3.37 | 15.02 ± 2.63 |
| 189 | 3 | 9.80 ± 0.13 | 14.48 ± 0.77 | 15.17 ± 1.96 | 10.22 ± 2.70 |
| 190 | 3 | 11.76 ± 0.51 | 20.56 ± 2.64 | 19.00 ± 2.42 | 11.64 ± 2.29 |
| 191 | 3 | 11.32 ± 0.62 | 19.45 ± 2.84 | 21.66 ± 1.85 | 14.43 ± 1.14 |
| 124 | 3 | 10.42 ± 0.73 | 14.95 ± 1.61 | 15.15 ± 2.25 | 10.47 ± 2.83 |
| 134 | 3 | 10.38 ± 0.51 | 14.42 ± 1.37 | 14.22 ± 1.27 | 8.34 ± 1.53 |
| 149 | 3 | 9.17 ± 0.80 | 13.51 ± 2.21 | 13.81 ± 2.70 | 7.51 ± 2.25 |
| 158 | 3 | 10.18 ± 0.69 | 14.32 ± 1.13 | 14.87 ± 0.63 | 10.14 ± 1.31 |
| 164 | 3 | 10.61 ± 0.78 | 16.34 ± 1.91 | 17.46 ± 1.99 | 11.20 ± 1.07 |
| 168 | 3 | 9.95 ± 1.19 | 14.28 ± 1.54 | 14.96 ± 1.54 | 9.12 ± 1.47 |
| 169 | 3 | 11.47 ± 0.85 | 20.63 ± 2.88 | 20.39 ± 2.06 | 12.83 ± 2.32 |
| 170 | 3 | 9.93 ± 0.62 | 13.88 ± 1.11 | 14.53 ± 0.88 | 9.00 ± 1.70 |
| 173 | 3 | 11.49 ± 0.56 | 15.40 ± 0.84 | 15.24 ± 1.26 | 8.99 ± 1.52 |
| 188 | 3 | 9.46 ± 0.61 | 14.70 ± 1.58 | 16.41 ± 1.18 | 13.31 ± 1.13 |
| 194 | 3 | 8.30 ± 0.99 | 11.46 ± 1.04 | 12.56 ± 1.34 | 9.19 ± 1.34 |
| 204 | 3 | 11.71 ± 0.25 | 16.57 ± 0.98 | 17.38 ± 1.19 | 12.41 ± 1.09 |
| 205 | 3 | 9.49 ± 1.21 | 15.40 ± 3.48 | 15.74 ± 3.93 | 10.00 ± 3.99 |
| 47 | 3 | 7.25 ± 0.74 | 9.61 ± 1.13 | 9.95 ± 1.85 | 4.66 ± 1.41 |
| 127 | 3 | 8.52 ± 0.60 | 12.80 ± 2.54 | 11.84 ± 3.94 | 6.58 ± 3.94 |
| 129 | 3 | 9.05 ± 0.45 | 12.08 ± 0.86 | 11.72 ± 1.19 | 6.30 ± 2.38 |
| 136 | 3 | 10.65 ± 0.59 | 16.56 ± 1.83 | 17.49 ± 1.92 | 12.94 ± 2.60 |
| 170 | 3 | 9.23 ± 0.94 | 16.86 ± 2.14 | 18.65 ± 2.18 | 13.18 ± 2.01 |
| 172 | 3 | 8.96 ± 1.09 | 14.83 ± 2.43 | 15.59 ± 2.58 | 9.66 ± 2.18 |
| 173 | 3 | 7.32 ± 0.48 | 12.28 ± 2.13 | 10.73 ± 2.42 | 8.24 ± 2.71 |
| 332 | 10 | 11.98 ± 0.58 | 25.92 ± 1.82 | 26.16 ± 1.79 | 20.60 ± 1.80 |
| 333 | 10 | 15.28 ± 0.85 | 31.38 ± 2.48 | 25.32 ± 2.46 | 15.80 ± 2.22 |
| 336 | 10 | 12.72 ± 0.65 | 28.04 ± 1.60 | 25.80 ± 2.14 | 20.42 ± 1.40 |
| 101 | 10 | 9.0 ± 0.42 | 21.50 ± 0.95 | 28.60 ± 2.88 | 24.36 ± 2.22 |
| 47 | 1 | 6.06 ± 0.55 | 8.92 ± 1.08 | 7.48 ± 0.93 | 5.76 ± 1.54 |
| 336 | 3 | 5.92 ± 1.17 | 10.13 ± 3.39 | 10.92 ± 3.74 | 8.73 ± 2.70 |
| 467 | 3 | 5.74 ± 0.88 | 10.63 ± 1.61 | 10.03 ± 1.65 | 7.59 ± 1.56 |
| 471 | 3 | 5.84 ± 0.41 | 10.54 ± 0.87 | 10.61 ± 0.77 | 6.37 ± 1.19 |
| 369 | 3 | 6.92 ± 0.49 | 10.67 ± 0.79 | 11.92 ± 0.37 | 9.33 ± 0.40 |
| 370 | 3 | 4.76 ± 0.68 | 7.99 ± 1.49 | 9.00 ± 1.94 | 5.53 ± 1.42 |
| 472 | 3 | 5.00 ± 0.33 | 7.70 ± 1.03 | 8.52 ± 0.91 | 7.41 ± 0.98 |
| 330 | 10 | 8.18 ± 0.52 | 9.48 ± 1.32 | 8.48 ± 1.81 | 8.00 ± 1.94 |
| 330 | 30 | 12.80 ± 0.48 | 20.64 ± 1.83 | 20.74 ± 2.75 | 15.88 ± 2.42 |
| 332 | 10 | 11.98 ± 0.52 | 25.92 ± 1.63 | 26.16 ± 1.60 | 20.6 ± 1.61 |
| 333 | 10 | 15.28 ± 0.76 | 31.38 ± 2.21 | 25.32 ± 2.2 | 15.8 ± 1.98 |
| 387 | 10 | 10.10 ± 0.47 | 12.95 ± 2.19 | 11.19 ± 2.91 | 5.59 ± 1.64 |
| 391 | 3 | 10.51 ± 0.55 | 12.7 ± 0.99 | 8.89 ± 1.27 | 5.29 ± 0.84 |
| 403 | 3 | 11.65 ± 0.57 | 16.41 ± 1.68 | 10.00 ± 1.50 | 5.35 ± 1.44 |
| 413 | 3 | 8.58 ± 0.97 | 8.11 ± 1.32 | 3.94 ± 1.02 | 1.00 ± 0.47 |
| 414 | 3 | 7.86 ± 0.74 | 7.82 ± 0.55 | 5.45 ± 0.33 | 2.72 ± 0.32 |
| 444 | 3 | 8.60 ± 0.80 | 8.93 ± 1.11 | 5.81 ± 0.96 | 3.20 ± 0.96 |
| 359 | 3 | 10.18 ± 0.69 | 11.72 ± 2.39 | 7.12 ± 2.62 | 3.94 ± 2.98 |
| 369 | 3 | 9.24 ± 0.78 | 10.46 ± 1.49 | 5.48 ± 1.17 | 2.20 ± 0.63 |
| 345 | 3 | 12.52 ± 0.81 | 16.68 ± 1.84 | 13.65 ± 1.99 | 10.17 ± 2.12 |
| 454 | 3 | 10.69 ± 0.67 | 14.25 ± 2.06 | 12.41 ± 2.06 | 6.93 ± 2.02 |
| 456 | 3 | 11.51 ± 0.82 | 15.32 ± 0.81 | 10.93 ± 0.46 | 6.22 ± 0.80 |
| 458 | 3 | 11.43 ± 1.38 | 18.42 ± 3.85 | 13.84 ± 3.82 | 9.40 ± 2.60 |
| 462 | 3 | 10.31 ± 0.41 | 13.69 ± 0.35 | 12.95 ± 0.50 | 10.9 ± 0.84 |
| 433 | 3 | 7.04 ± 0.43 | 8.20 ± 0.56 | 7.73 ± 1.46 | 5.82 ± 2.19 |
| 483 | 10 | — | 7.45 ± 0.94 | 19.64 ± 2.05 | 14.11 ± 1.49 |
| 484 | 10 | — | 10.68 ± 1.34 | 23.36 ± 1.34 | 17.01 ± 2.68 |
| 485 | 10 | — | 12.67 ± 0.47 | 27.23 ± 2.52 | 17.52 ± 2.65 |

### Body Weight Dose-Response Studies in Obese Mice

[0567] The in vivo efficacy of example compounds on body weight and food intake was determined in a diet-induced mouse model of obesity (DIO). Male C57BL/6 obese mice were maintained on a calorie-rich diet (containing 40% kcal from fat) and were housed in a temperature-controlled facility (24° C.) with 12-hour light/dark cycle (lights on 22:00) and given ad libitum access to food and water. To examine the dose-dependent effects of Compounds 170, 172, 387, and 456 on body weight, obese animals received a weekly subcutaneous dose of vehicle (40 mM Tris-HCl at pH 8.0), or the test articles (0.3, 1, 3, 10 and 10 nmol/kg). Treatment of obese mice with the test articles dose-dependently reduced body weight when compared to control animals (FIGS. 44-47). Values are presented as mean±SEM, n=6 per group. Statistical analysis was performed using a two-way ANOVA, followed by Dunnett's method for multiple comparisons. Significant differences were identified at p<0.05. Together, these findings indicate that the example compounds provide robust weight loss.

1. A compound of the formula: [chemical structure]
or a pharmaceutically acceptable salt thereof, wherein:
X_{TPP} is a therapeutic polypeptide conjugated to a fatty acid moiety;
Z comprises O, C(O), NH, C₁ to C₃₀ alkyl, (OCH₂CH₂)ₘ, [C(O)NH—CH₂CH₂OCH₂]ₘ, (2-[2-(2-amino-ethoxy)-ethoxy]-acetyl)ₘ, an amino acid, a peptide, or a combination thereof, wherein m is an integer between 1-30;
U comprises C₁ to C₅ alkyl, N, phenyl, or phenyl carbonyl, or a combination thereof;
R¹ and R² are independently absent, a covalent bond, or C₁ to C₅ alkyl;
R³ and R⁴ are independently absent or an amide;
R⁵ and R⁶ are independently absent or R⁵ and R⁶ independently comprise C₁ to C₅ alkyl, phenyl, CH₂O(CH₂CH₂O)ₙ, or a combination thereof, wherein n is an integer between 1-5, wherein C₁ to C₅ alkyl is optionally substituted with one or more of NH₂, CH₂NH₂, and CH₂CH₂NH₂; and
R⁷ and R⁸ are independently absent or selected from the group consisting of: [chemical structure]
wherein (*) comprises a connection point to R⁹ or R¹⁰ and (**) comprises a connection point to R⁵ or R⁶; and
R⁹ and R¹⁰ are independently an antibody fragment comprising an Fc region.

2. The compound of claim 1 or a pharmaceutically acceptable salt thereof, wherein R⁷ and R⁸ are:

[chemical structure]

3. The compound of claim 2 or a pharmaceutically acceptable salt thereof, wherein:
R⁵ and R⁶ are each a C₂ alkyl substituted with NH₂;
R³ and R⁴ are each an amide;
R¹ and R² are each a C₂ alkyl; and
U is N or a phenyl.

4. The compound of claim 3 or a pharmaceutically acceptable salt thereof, wherein the compound comprises:

[chemical structure]

5. The compound of claim 1 or a pharmaceutically acceptable salt thereof, wherein R⁷ and R⁸ are:

[chemical structure]

6. The compound of claim 5 or a pharmaceutically acceptable salt thereof, wherein:
R⁵ and R⁶ each comprise phenyl and CH₂O(CH₂CH₂O)ₙ, wherein n is 2;
R³ and R⁴ are each an amide;
R¹ and R² are each a C₂ alkyl; and
U is N or a phenyl.

7. The compound of claim 6 or a pharmaceutically acceptable salt thereof, wherein the compound comprises:

[chemical structure]

8. The compound of claim 1 or a pharmaceutically acceptable salt thereof, wherein R⁷ and R⁸ are each:

[chemical structure]

9. The compound of claim 10 or a pharmaceutically acceptable salt thereof, wherein:
R⁵ and R⁶ each comprise phenyl and CH₂O(CH₂CH₂O)ₙ, wherein n is 2;
R³ and R⁴ are each an amide;
R¹ and R² are each a C₂ alkyl; and
U is N or a phenyl.

10. The compound of claim 9 or a pharmaceutically acceptable salt thereof, wherein the compound comprises:

[chemical structure]

11. The compound of claim 1 or a pharmaceutically acceptable salt thereof, wherein:
R⁷ and R⁸ are each absent;
R⁵ and R⁶ are each C₁ alkyl;
R³ and R⁴ are each an amide;
R¹ and R² are each a C₂ alkyl; and
U is N or a phenyl.

12. The compound of claim 11 or a pharmaceutically acceptable salt thereof, wherein the compound comprises:

[chemical structure]

13. The compound of claim 1 or a pharmaceutically acceptable salt thereof, wherein the compound comprises:

[chemical structure]

14. The compound of claim 1 or a pharmaceutically acceptable salt thereof, wherein Z comprises: (OCH₂CH₂)₂₄—NH—C(O)CH₂CH₂.

15. The compound of claim 1 or a pharmaceutically acceptable salt thereof, wherein Z comprises one to eight (2-[2-(2-amino-ethoxy)-ethoxy]-acetyl) moieties.

16. The compound of claim 1 or a pharmaceutically acceptable salt thereof, wherein Z comprises a peptide comprising any of SEQ ID NO:1182-1217.

17. The compound of claim 1 or a pharmaceutically acceptable salt thereof, wherein the therapeutic polypeptide comprises an agonist at one or more of the GIP, GLP-1, and glucagon receptors.

18. The compound of claim 1 or a pharmaceutically acceptable salt thereof, wherein the therapeutic polypeptide comprises:
(SEQ ID NO: 1218)
X₁X₂X₃X₄TX₆TSDX₁₀X₁₁X₁₂X₁₃LX₁₅X₁₆KAX₁₉X₂₀X₂₁FIX₂₄X₂₅LX₂₇X₂₈
X₂₉X₃₀X₃₁X₃₂X₃₃X₃₄X₃₅X₃₆X₃₇X₃₈X₃₉X₄₀X₄₁,
wherein:
X₁ is H, NMeY, or Y;
X₂ is Ac4c, Aib, αMeS, Iva, or D-Ala;
X₃ is Q, E, or H;
X₄ is G or D-Ala;
X₆ is αMeF(2F), F, or αMeF;
X₁₀ is 4-Pal, Y, or V;
X₁₁ is Aib, S, or αMeS;
X₁₂ is I or S;
X₁₃ is L or αMeL;
X₁₅ is D or E;
X₁₆ is K, E or Orn;
X₁₉ is A or Q;
X₂₀ is Aib, αMeL, Iva, or αMe4Pal;
X₂₁ is E, Q, D, or Orn;
X₂₄ is K, Q, E, D-Glu, or D-Gln;
X₂₅ is αMeY, W, or Y;
X₂₇ is I, L, or V;
X₂₈ K, E or A;
X₂₉ is Aib, G, S or Q;
X₃₀ is G, H or S;
X₃₁ is P, G, E, or Orn;
X₃₂ is absent, K, S or P;
wherein if X₃₂ is S or P, then X₃₃ is S;
wherein if X₃₃ is S, then X₃₄ is G or Aib;
wherein if X₃₄ is G or Aib, then X₃₅ is absent or A or Orn;
wherein if X₃₅ is A or Orn, then X₃₆ is absent or P;
wherein if X₃₆ is P, then X₃₇ is absent or P;
wherein if X₃₇ is P, then X₃₈ is absent, P or Ac3c;
wherein if X₃₈ is P or Ac3c, then X₃₉ is absent or S, Orn, or G;
wherein if X₃₉ is S, Orn, or G, then X₄₀ is absent, K, or G;
wherein if X₄₀ is K or G, then X₄₁ is absent or S or G;
wherein if X₃₂ is absent or K, then X₃₃ through X₄₁ are also absent;
wherein if X₃₅ is absent, then X₆₆ through X₄₁ are also absent;
wherein if X₃₆ is absent, then X₃₇ through X₄₁ are also absent;
wherein if X₃₇ is absent, then X₃₈ through X₄₁ are also absent;
wherein if X₃₈ is absent, then X₃₉ through X₄₁ are also absent;
wherein if X₃₉ is absent, then X₄₀ and X₄₁ are also absent;
wherein if X₄₀ is absent, then X₄₁ is absent.

19. The compound of claim 31 or a pharmaceutically acceptable salt thereof, wherein one of X₂₄, X₂₈, X₃₂ or X₄₀ is conjugated to Z.

20. The compound of claim 1 or a pharmaceutically acceptable salt thereof, wherein the therapeutic polypeptide comprises a 90% sequence identity to any of SEQ ID NOs: 1-186 or SEQ ID NOs: 996-1038.

21. The compound of claim 1 or a pharmaceutically acceptable salt thereof, wherein the therapeutic polypeptide comprises any of SEQ ID NOs: 1-186 or SEQ ID NOs: 996-1038.

22. The compound of claim 21 or a pharmaceutically acceptable salt thereof, wherein the fatty acid moiety is a C₁₆-C₂₂ fatty acid.

23. The compound of claim 22 or a pharmaceutically acceptable salt thereof, wherein the fatty acid is conjugated to the therapeutic polypeptide at position K17 via a linker.

24. The compound of claim 23 or a pharmaceutically acceptable salt thereof, wherein the linker comprises one to four amino acids.

25. The compound of claim 24 or a pharmaceutically acceptable salt thereof, wherein the linker comprises on or more of the amino acids Lys, εLys, Glu, γGlu or a combination thereof.

26. The compound of claim 23 or a pharmaceutically acceptable salt thereof, wherein the linker comprises one to eight (2-[2-(2-amino-ethoxy)-ethoxy]-acetyl) moieties.

27. The compound of claim 23 or a pharmaceutically acceptable salt thereof, wherein the linker and fatty acid comprise a structure of (εLys)ₐ(γGlu)_{b}-(2-[2-(2-amino-ethoxy)-ethoxy]-acetyl)_{c}-CO—(CH₂)p-CO₂H, wherein a is an integer between 0, 1 or 2, b is an integer between 0 or 1, c is an integer between 1 to 8, and p is an integer between 14 to 18.

28. The compound of claim 1 or a pharmaceutically acceptable salt thereof, wherein the therapeutic polypeptide conjugated to the fatty acid moiety comprises a 90% sequence identity to any of SEQ ID NOs:187-458 or SEQ ID NOs: 1039-1098.

29. The compound of claim 1 or a pharmaceutically acceptable salt thereof, wherein the therapeutic polypeptide conjugated to the fatty acid moiety comprises any of SEQ ID NOs:187-458 or SEQ ID NOs: 1039-1098.

30. The compound of claim 1, or a pharmaceutically acceptable salt thereof, wherein the Fc region is selected from any of SEQ ID NOs:935-936, 941-948; 1178-1181.

31. The compound of claim 1 or a pharmaceutically acceptable salt thereof, wherein the compound is selected from any of SEQ ID NOs: 459-934 or 1099-1177.

32. A compound of the formula: [chemical structure]
or a pharmaceutically acceptable salt thereof, wherein:
X_{TPP} is a therapeutic polypeptide, comprising:
(SEQ ID NO: 1219)
YAibEGTX₆TSDX₁₀X₁₁X₁₂X₁₃LX₁₅X₁₆KAQX₂₀X₂₁FIX₂₄X₂₅LX₂₇X₂₈X₂₉
X₃₀X₃₁X₃₂X₃₃X₃₄X₃₅X₃₆X₃₇X₃₈X₃₉X₄₀X₄₁
wherein:
X₆ is αMeF(2F), F, or αMeF;
X₁₀ is 4-Pal, Y, or V;
X₁₁ is Aib or S;
X₁₂ is I or S;
X₁₃ is L or αMeL;
X₁₅ is D or E;
X₁₆ is E or Orn;
X₂₀ is Aib, αMeL, or Iva;
X₂₁ is E, Q, D, or Orn;
X₂₄ is K, Q, E, or D-Glu;
X₂₅ is αMeY or Y;
X₂₇ is I, L, or V;
X₂₈ K, E or A;
X₂₉ is Aib, G, or Q;
X₃₀ is G or S;
X₃₁ is P, G, E, or Orn;
X₃₂ is absent, K, S, or P;
wherein if X₃₂ is S or P, then X₃₃ is S;
wherein if X₃₃ is S, then is X₃₄ is G or Aib;
wherein if X₃₄ is G or Aib, then X₃₅ is absent, A, or Orn;
wherein if X₃₅ is A or Orn, then X₃₆ is absent or P;
wherein if X₃₆ is P, then X₃₇ is absent or P;
wherein if X₃₇ is P, then X₃₈ is absent or P;
wherein if X₃₈ is P, then X₃₉ is absent, S, Orn, or G;
wherein if X₃₉ is S, Orn, or G, then X₄₀ is absent, K, or G;
wherein if X₄₀ is K or G, then X₄₁ is absent, S, or G;
wherein if X₃₂ is absent or K, then X₃₃ through X₄₁ are also absent;
wherein if X₃₅ is absent, then X₃₆ through X₄₁ are also absent;
wherein if X₃₆ is absent, then X₃₇ through X₄₁ are also absent;
wherein if X₃₇ is absent, then X₃₈ through X₄₁ are also absent;
wherein if X₃₈ is absent, then X₃₉ through X₄₁ are also absent;
wherein if X₃₉ is absent, then X₄₀ and X₄₁ are also absent;
wherein if X₄₀ is absent, then X₄₁ is absent;
L is a linker, conjugated to each of R⁹, R¹⁰, and the therapeutic polypeptide;
wherein R⁹ and R¹⁰ are independently an antibody fragment comprising an Fc region; and
wherein one of X₂₄, X₂₈, X₃₂ or X₄₀ is conjugated to the linker.

33. The compound of claim 32 or a pharmaceutically acceptable salt thereof, wherein the therapeutic polypeptide has dual agonist activity at the GIP and GLP-1 receptors.

34. The compound of claim 32, or a pharmaceutically acceptable salt thereof, comprising each of:
X₁ is Y; X₂ is Aib; X₃ is E; X₄ is G; X₆ is αMeF(2F); X₁₀ is 4-Pal or Y; X₁₁ is Aib or S; X₁₂ is I; X₁₃ is αMeL; X₁₅ is D; Xie is E or Orn; X₁ is Q; X₂₀ is Aib; X₂₁ is E; X₂₄ is Q, E, or D-Glu; X₂₅ is αMeY; X₂₇ is I; X₂₈ E; X₂₉ is Aib or G; X₃₀ is G or S; X₃₁ is P; X₃₂ is G or S;
wherein if X₃₂ is S then X₃₃ is S, X₃₄ is G, X₃₅ is A, X₃₆ is P, X₃₇ is P, X₃₈ is P, X₃₉ is S, X₄₀ is K, and X₄₁ is absent, and the linker is conjugated at X₄₀;
wherein if X₃₂ is G, then X₃₃ through X₄₁ are absent, and the linker is conjugated at X₃₂.

35. The compound of claim 34, or a pharmaceutically acceptable salt thereof, comprising at least one of: X₁₀ is Y or 4-Pal; X₁₁ is Aib or S; X₂₄ is Q, E, or D-Glu; and X₃₀ is G or S.

36. The compound of claim 34, or pharmaceutically acceptable salt thereof, comprising each of: X₁₀ is Y or 4-Pal; X₁₁ is Aib; X₂₄ is E; and X₃₀ is S; and wherein X₄₀ is K and is conjugated to the linker.

37. The compound of claim 34 or a pharmaceutically acceptable salt thereof, wherein the therapeutic polypeptide comprises a 90% sequence identity to any of SEQ ID NOs:1-92 or SEQ ID NOs:996-999.

38. The compound of claim 34, or a pharmaceutically acceptable salt thereof, wherein the therapeutic polypeptide comprises any of NOs:1-92 or SEQ ID NOs:996-999.

39. The compound of claim 34, or a pharmaceutically acceptable salt thereof, wherein the therapeutic polypeptide comprises any of SEQ ID NOs: 1, 2, 22, 43, 45, 48, 55, 56, 58, 59, 61, 66, 68 and 47.

40. The compound of claim 34, or a pharmaceutically acceptable salt thereof, wherein the therapeutic polypeptide is conjugated to a C₁₆-C₂₂ fatty acid moiety at position 17 via a second linker.

41. The compound of claim 40, or a pharmaceutically acceptable salt thereof, wherein the second linker comprises one or more of the amino acids Lys, εLys, Glu, γGlu or a combination thereof.

42. The compound of claim 40, or a pharmaceutically acceptable salt thereof, wherein the second linker comprises one to eight (2-[2-(2-amino-ethoxy)-ethoxy]-acetyl) moieties.

43. The compound of claim 40, or a pharmaceutically acceptable salt thereof, wherein the second linker and fatty acid comprises a structure of (εLys)ₐ(γGlu)_{b}-(2-[2-(2-amino-ethoxy)-ethoxy]-acetyl)_{c}-CO—(CH₂)ₚ—CO₂H, wherein a is an integer between 0, 1 or 2, b is an integer between 0 or 1, c is an integer between 1 to 8, and p is an integer between 14 to 18.

44. The compound of claim 40 or a pharmaceutically acceptable salt thereof, wherein the therapeutic polypeptide conjugated to the fatty acid moiety via the second linker comprises a 90% sequence identity to any of SEQ ID NOs:187-332 or SEQ ID NOs:1039-1042.

45. The compound of claim 40, or a pharmaceutically acceptable salt thereof, wherein the therapeutic polypeptide conjugated to the fatty acid moiety via the second linker comprises any of SEQ ID NOs:187-332 or SEQ ID NOs:1039-1042.

46. The compound of claim 40, or a pharmaceutically acceptable salt thereof, wherein the therapeutic polypeptide conjugated to the fatty acid moiety via the second linker comprises any of SEQ ID NOs: 187, 209, 235, 237, 241, 243, 257, 258, 260, 262, 263, 264, 266, 267, 275 or 277.

47. The compound of claim 32, or a pharmaceutically acceptable salt thereof, wherein the Fc region is selected from any of SEQ ID NOs:935-936, 941-948 or 1178-1181.

48. The compound of claim 32 or a pharmaceutically acceptable salt thereof, wherein the linker comprises: [chemical structure]
wherein:
Z comprises O, C(O), NH, C₁ to C₃₀ alkyl, (OCH₂CH₂)ₘ, [C(O)NH—CH₂CH₂OCH₂]ₘ, a peptide, or a combination thereof; wherein m is an integer between 1-30, and wherein (***) comprises a connection point to the therapeutic polypeptide;
U comprises C₁ to C₅ alkyl, N, phenyl, or phenyl carbonyl, or a combination thereof;
R¹ and R² are independently a covalent bond, or C₁ to C₅ alkyl;
R³ and R⁴ are absent or an amide;
R⁵ and R⁶ are independently absent or R⁵ and R⁶ independently comprise C₁ to C₅ alkyl, phenyl, CH₂O(CH₂CH₂O)o, or a combination thereof, wherein n is an integer between 1-5, wherein C₁ to C₅ alkyl is optionally substituted with one or more of NH₂, CH₂NH₂, and CH₂CH₂NH₂;
R⁷ and R⁸ are absent or independently selected from the group consisting of: [chemical structure]
wherein:
(*) comprises a connection point to R⁹ or R¹⁰ and (**) comprises a connection point to R⁵ or R⁶.

49. The compound of claim 48, or pharmaceutically acceptable salt thereof, wherein R⁷ and R⁸ are:

[chemical structure]

50. The compound of claim 49 or a pharmaceutically acceptable salt thereof, wherein the linker comprises: [chemical structure]
wherein (*) comprises a connection point to R⁹ or R¹⁰.

51. The compound of claim 48 or a pharmaceutically acceptable salt thereof, wherein R⁷ and R⁸ are:

[chemical structure]

52. The compound of claim 51 or a pharmaceutically acceptable salt thereof, wherein the linker comprises: [chemical structure]
wherein (*) comprises a connection point to R⁹ or R¹⁰.

53. The compound of claim 48, wherein Z comprises: (OCH₂CH₂)₂₄—NH—C(O)CH₂CH₂.

54. The compound of claim 48 or a pharmaceutically acceptable salt thereof, wherein Z comprises one to eight (2-[2-(2-amino-ethoxy)-ethoxy]-acetyl) moieties.

55. The compound of claim 48, or a pharmaceutically acceptable salt thereof, wherein Z comprises a peptide comprising any of SEQ ID NO:1182-SEQ ID NO:1217.

56. The compound of claim 32 or a pharmaceutically acceptable salt thereof, wherein the compound is any of SEQ ID NOs:459-787 or SEQ ID NOs:1099-1100.

57. The compound of claim 32, or a pharmaceutically acceptable salt thereof, wherein the compound is any of SEQ ID NOs: 459, 490, 505, 585, 587, 594, 616, 622, 626, 627, 628, 630, 631, 639, 641, 642, 643, 645, 646, 662, 698, 699, 700 or 1100.

58. A compound of the formula: [chemical structure]
or a pharmaceutically acceptable salt thereof, wherein:
X_{TPP} is a therapeutic polypeptide, comprising:
(SEQ ID NO: 1220)
X₁X₂X₃X₄TX₆TSDX₁₀X₁₁X₁₂X₁₃LX₁₅X₁₆KAQX₂₀X₂₁FIX₂₄X₂₅LX₂₇X₂₈X₂₉
X₃₀X₃₁X₃₂X₃₃X₃₄X₃₅X₃₆X₃₇X₃₈X₃₉X₄₀X₄₁
wherein:
X₁ is H, NMeY, or Y;
X₂ is Ac4c, Aib, αMeS, Iva, or D-Ala;
X₃ is Q, E, or H;
X₄ is G or D-Ala;
X₆ is αMeF(2F), F, or αMeF;
X₁₀ is 4-Pal, Y, or V;
X₁₁ is Aib, S, or αMeS;
X₁₂ is I or S;
X₁₃ is L or αMeL;
X₁₅ is D or E;
X₁₆ is E or Orn;
X₂₀ is Aib, αMeL, Iva, or αMe4Pal;
X₂₁ is E, Q, D, or Orn;
X₂₄ is K, Q, E, D-Glu, or D-Gln;
X₂₅ is αMeY or Y;
X₂₇ is I, L, or V;
X₂₈ K, E or A;
X₂₉ is Aib, S, G, or Q;
X₃₀ is G, S or H;
X₃₁ is P, G, E, or Orn;
X₃₂ is absent, K, S or P;
wherein if X₃₂ is S or P, then X₃₃ is S;
wherein if X₃₃ is S, then X₃₄ is G or Aib;
wherein if X₃₄ is G or Aib, then X₃₅ is absent or A or Orn;
wherein if X₃₅ is A or Orn, then X₃₆ is absent or P;
wherein if X₃₆ is P, then X₃₇ is absent or P;
wherein if X₃₇ is P, then X₃₈ is absent or P;
wherein if X₃₈ is P, then X₃₉ is absent or S, Orn, or G;
wherein if X₃₉ is S, Orn, or G, then X₄₀ is absent, K, or G;
wherein if X₄₀ is K or G, then X₄₁ is absent or S or G;
wherein if X₃₂ or K is absent, then X₃₃ through X₄₁ are also absent;
wherein if X₃₅ is absent, then X₃₆ through X₄₁ are also absent;
wherein if X₃₆ is absent, then X₃₇ through X₄₁ are also absent;
wherein if X₃₇ is absent, then X₃₈ through X₄₁ are also absent;
wherein if X₃₈ is absent, then X₃₉ through X₄₁ are also absent;
wherein if X₃₉ is absent, then X₄₀ and X₄₁ are also absent;
wherein if X₄₀ is absent, then X₄₁ is absent;
L is a linker conjugated to each of R⁹, R¹⁰, and the therapeutic polypeptide;
wherein R⁹ and R¹⁰ are each an antibody fragment comprising an Fc region; and
one of X₂₄, X₃₂ or X₄₀ is conjugated to the linker.

59. The compound of claim 58, or a pharmaceutically acceptable salt thereof, wherein the therapeutic polypeptide has triple agonist activity at the GIP, GLP-1, and glucagon receptors.

60. The compound of claim 58, or a pharmaceutically acceptable salt thereof, comprising each of: X₁ is H or Y; X₂ is Aib; X₃ is Q; X₄ is G; X₆ is αMeF(2F); X₁₀ is Y or 4-Pal; X₁₁ is S or αMeS; X₁₂ is I; X₁₃ is αMeL; X₁₅ is D; X₂₀ is Aib or αMe4Pal; X₂₁ is E or Orn; X₂₄ is E or d-Glu; X₂₅ is αMeY; X₂₇ is L or I; X₂₈ is E; X₂₉—X₃₉ is GSPSSGAPPPS; and X₄₀ is K.

61. The compound of claim 60, or a pharmaceutically acceptable salt thereof, comprising at least one of: X₁₀ is Y or 4-Pal; X₂₄ is E or d-Glu; and X₃₀ is S.

62. The compound of claim 60, or a pharmaceutically acceptable salt thereof, comprising each of: X₁₀ is Y or 4-Pal; X₂₄ is E or d-Glu; X₃₀ is S and X₄₀ is K and is conjugated to the linker.

63. The compound of claim 58, or a pharmaceutically acceptable salt thereof, wherein the therapeutic polypeptide comprises a 90% sequence identity to any of SEQ ID NOs: 93-186 or SEQ ID NOs:1000-1038.

64. The compound of claim 58, or a pharmaceutically acceptable salt thereof, wherein the therapeutic polypeptide comprises any of SEQ ID NOs: 93-186 or SEQ ID NOs:1000-1038.

65. The compound of claim 58, or a pharmaceutically acceptable salt thereof, wherein the therapeutic polypeptide comprises any of SEQ ID NOs: 97, 113, 128, 130, 144, 171, 183.

66. The compound of claim 58, or a pharmaceutically acceptable salt thereof, wherein the therapeutic polypeptide is conjugated to a C₁₆-C₂₂ fatty acid moiety at position K17 via a second linker.

67. The compound of claim 66, or a pharmaceutically acceptable salt thereof, wherein the second linker comprises one or more of the amino acids Lys, εLys, Glu, γGlu or a combination thereof.

68. The compound of claim 66, or a pharmaceutically acceptable salt thereof, wherein the second linker comprises one to eight (2-[2-(2-amino-ethoxy)-ethoxy]-acetyl) moieties.

69. The compound of claim 66, or a pharmaceutically acceptable salt thereof, wherein the second linker and fatty acid comprises a structure of (εLys)ₐ(γGlu)_{b}-(2-[2-(2-amino-ethoxy)-ethoxy]-acetyl)_{c}-CO—(CH₂)ₚ—CO₂H, wherein a is an integer between 0, 1 or 2, b is an integer between 0 or 1, c is an integer between 1 to 8, and p is an integer between 14 to 18.

70. The compound of claim 66, or a pharmaceutically acceptable salt thereof, wherein the therapeutic polypeptide conjugated to the fatty acid moiety via the second linker comprises a 90% sequence identity to any of SEQ ID NOs:333-458 or SEQ ID NOs:1043-1098.

71. The compound of claim 66, or a pharmaceutically acceptable salt thereof, wherein the therapeutic polypeptide conjugated to the fatty acid moiety via the second linker comprises any of SEQ ID NOs:333-458 or SEQ ID NOs:1043-1098.

72. The compound of claim 66, or a pharmaceutically acceptable salt thereof, wherein the therapeutic polypeptide conjugated to the fatty acid moiety via the second linker comprises any of SEQ ID NOs: 337, 380, 395, 404, 423, 424, 426, 435, 447, 450, 467, 490 or 493.

73. The compound of claim 58, or a pharmaceutically acceptable salt thereof, wherein the Fc region is selected from any of SEQ ID NOs:935-936, 941-948 or 1178-1181.

74. The compound of claim 58, or a pharmaceutically acceptable salt thereof, wherein the linker comprises: [chemical structure]
wherein:
Z comprises O, C(O), NH, C₁ to C₃₀ alkyl, (OCH₂CH₂)ₘ, [C(O)NH—CH₂CH₂OCH₂]ₘ, a peptide, or a combination thereof; wherein m is an integer between 1-30 and wherein (***) comprises a connection point to the therapeutic polypeptide;
U comprises C₁ to C₅ alkyl, N, phenyl, or phenyl carbonyl, or a combination thereof;
R¹ and R² are independently a covalent bond, or C₁ to C₅ alkyl;
R³ and R⁴ are absent or an amide;
R⁵ and R⁶ are independently absent or R⁵ and R⁶ independently comprise C₁ to C₅ alkyl; phenyl, CH₂O(CH₂CH₂O)o, or a combination thereof, wherein n is an integer between 1-5, wherein C₁ to C₅ alkyl is optionally substituted with one or more of NH₂, CH₂NH₂, and CH₂CH₂NH₂;
R⁷ and R⁸ are absent or independently selected from the group consisting of: [chemical structure]
wherein:
(*) comprises a connection point to R⁹ or R¹⁰ and (**) comprises a connection point to R⁵ or R⁶.

75. The compound of claim 74, or a pharmaceutically acceptable salt thereof, wherein R⁷ and R⁸ are:

[chemical structure]

76. The compound of claim 75 or a pharmaceutically acceptable salts thereof, wherein the linker comprises: [chemical structure]
wherein (*) comprises a connection point to R⁹ or R¹⁰.

77. The compound of claim 74 or a pharmaceutically acceptable salt thereof, wherein R⁷ and R⁸ are:

[chemical structure]

78. The compound of claim 74, or pharmaceutically acceptable salt thereof, wherein the linker comprises: [chemical structure]
wherein (*) comprises a connection point to R⁹ or R₁₀.

79. The compound of claim 74, or a pharmaceutically acceptable salt thereof, wherein Z comprises: (OCH₂CH₂)₂₄—NH—C(O)CH₂CH₂.

80. The compound of claim 74, or a pharmaceutically acceptable salt thereof, wherein Z comprises one to eight (2-[2-(2-amino-ethoxy)-ethoxy]-acetyl) moieties.

81. The compound of claim 90, wherein Z comprises a peptide comprising any of SEQ ID NOs:1182-1217.

82. The compound of claim 74, or a pharmaceutically acceptable salt thereof, wherein the compound is any of SEQ ID NOs:788-934 or SEQ ID NOs: 1101-1177.

83. The compound of claim 74, or a pharmaceutically acceptable salt thereof, wherein the compound is any of SEQ ID NOs: 792, 843, 859, 869, 889, 891, 900, 912, 915, 1101, 1102, 1103, 1104, 1110, 1172, 1173, 1174 or 1175.

84. The compound of claim 1, or a pharmaceutically acceptable salt thereof, wherein the compound has a sufficiently extended duration of action to allow for dosing once monthly.

85. A pharmaceutical composition comprising the compound of claim 1, or a pharmaceutically acceptable salt thereof, and at least one pharmaceutically acceptable carrier, diluent, or excipient.

86. A method of treating a disease or condition, the method comprising a step of administering to an individual in need thereof an effective amount of a compound of claim 1, or a pharmaceutically acceptable salt thereof, once monthly.

87. The method of claim 104, wherein the disease or condition is selected from the group consisting of diabetes mellitus, obesity, chronic weight management, non-alcoholic fatty liver disease (NAFLD), non-alcoholic steatohepatitis (NASH), dyslipidemia, metabolic syndrome, chronic kidney disease (CKD), osteoarthritis (OA), obesity-related sleep apnea (OSA), polycystic ovary syndrome (PCOS), Parkinson's disease, Alzheimer's disease, heart failure (HF), hypertension (HT), peripheral arterial disease (PAD), metabolic syndrome, chronic lower back pain (CLBP), hepatic cirrhosis, polycystic ovary syndrome, and/or alcohol abuse disorder.

The application's sequence listing, which the Patent Office published only in electronic form, follows.

SEQUENCE LISTING (1223 sequences)

SEQ ID NO: 1 - protein, 39 aa, synthetic construct
  SITE 2: note = 2-aminoisobutyric acid
  SITE 6: note = (S)-2-amino-3-(2-fluorophenyl)-2-methylpropanoic acid
  SITE 10: note = 3-(4-pyridyl)-L-alanine
  SITE 13: note = Alpha-methyl-L-leucine
  SITE 20: note = 2-aminoisobutyric acid
  SITE 24: note = D-Glutamic acid
  SITE 25: note = Alpha-methyl-L-tyrosine
YXEGTXTSDXSIXLDEKAQXEFIEXLIEGSPSSGAPPPS

SEQ ID NO: 2 - protein, 39 aa, synthetic construct
  SITE 2: note = 2-aminoisobutyric acid
  SITE 6: note = (S)-2-amino-3-(2-fluorophenyl)-2-methylpropanoic acid
  SITE 10: note = 3-(4-pyridyl)-L-alanine
  SITE 13: note = Alpha-methyl-L-leucine
  SITE 16: note = Ornithine
  SITE 20: note = 2-aminoisobutyric acid
  SITE 24: note = D-Glutamic acid
  SITE 25: note = Alpha-methyl-L-tyrosine
YXEGTXTSDXSIXLDXKAQXEFIEXLIEGSPSSGAPPPS

SEQ ID NO: 3 - protein, 31 aa, synthetic construct
  SITE 2: note = 2-aminoisobutyric acid
  SITE 6: note = (S)-2-amino-3-(2-fluorophenyl)-2-methylpropanoic acid
  SITE 10: note = 3-(4-pyridyl)-L-alanine
  SITE 13: note = Alpha-methyl-L-leucine
  SITE 20: note = 2-aminoisobutyric acid
  SITE 24: note = D-Glutamic acid
  SITE 25: note = Alpha-methyl-L-tyrosine
YXEGTXTSDXSIXLDEKAQXEFIEXLIEGGG

SEQ ID NO: 4 - protein, 39 aa, synthetic construct; identical to SEQ ID NO: 1
  SITE 2: note = 2-aminoisobutyric acid
  SITE 6: note = (S)-2-amino-3-(2-fluorophenyl)-2-methylpropanoic acid
  SITE 10: note = 3-(4-pyridyl)-L-alanine
  SITE 13: note = Alpha-methyl-L-leucine
  SITE 20: note = 2-aminoisobutyric acid
  SITE 25: note = Alpha-methyl-L-tyrosine

SEQ ID NO: 5 - protein, 39 aa, synthetic construct
  SITE 2: note = 2-aminoisobutyric acid
  SITE 6: note = (S)-2-amino-3-(2-fluorophenyl)-2-methylpropanoic acid
  SITE 10: note = 3-(4-pyridyl)-L-alanine
  SITE 11: note = 2-aminoisobutyric acid
  SITE 13: note = Alpha-methyl-L-leucine
  SITE 20: note = 2-aminoisobutyric acid
  SITE 25: note = Alpha-methyl-L-tyrosine
YXEGTXTSDXXIXLDEKAQXEFIEXLIEGSPSSGAPPPS

SEQ ID NO: 6 - protein, 39 aa, synthetic construct
  SITE 2: note = 2-aminoisobutyric acid
  SITE 6: note = (S)-2-amino-3-(2-fluorophenyl)-2-methylpropanoic acid
  SITE 10: note = 3-(4-pyridyl)-L-alanine
  SITE 11: note = 2-aminoisobutyric acid
  SITE 13: note = Alpha-methyl-L-leucine
  SITE 20: note = 2-aminoisobutyric acid
  SITE 25: note = Alpha-methyl-L-tyrosine
YXEGTXTSDXXSXLDEKAQXEFIEXLIEGSPSSGAPPPS

SEQ ID NO: 7 - protein, 39 aa, synthetic construct
  SITE 2: note = 2-aminoisobutyric acid
  SITE 6: note = (S)-2-amino-3-(2-fluorophenyl)-2-methylpropanoic acid
  SITE 10: note = 3-(4-pyridyl)-L-alanine
  SITE 13: note = Alpha-methyl-L-leucine
  SITE 20: note = 2-aminoisobutyric acid
  SITE 25: note = Alpha-methyl-L-tyrosine
YXEGTXTSDXSIXLEEKAQXEFIEXLIEGSPSSGAPPPS

SEQ ID NO: 8 - protein, 39 aa, synthetic construct
  SITE 2: note = 2-aminoisobutyric acid
  SITE 6: note = (S)-2-amino-3-(2-fluorophenyl)-2-methylpropanoic acid
  SITE 11: note = 2-aminoisobutyric acid
  SITE 13: note = Alpha-methyl-L-leucine
  SITE 20: note = 2-aminoisobutyric acid
  SITE 24: note = D-Glutamic acid
  SITE 25: note = Alpha-methyl-L-tyrosine
YXEGTXTSDVXIXLDEKAQXEFIEXLIEGSPSSGAPPPS

SEQ ID NO: 9 - protein, 39 aa, synthetic construct
  SITE 2: note = 2-aminoisobutyric acid
  SITE 6: note = (S)-2-amino-3-(2-fluorophenyl)-2-methylpropanoic acid
  SITE 11: note = 2-aminoisobutyric acid
  SITE 13: note = Alpha-methyl-L-leucine
  SITE 16: note = Ornithine
  SITE 20: note = 2-aminoisobutyric acid
  SITE 24: note = D-Glutamic acid
  SITE 25: note = Alpha-methyl-L-tyrosine
YXEGTXTSDVXIXLDXKAQXEFIEXLIEGSPSSGAPPPS

SEQ ID NO: 10 - protein, 39 aa, synthetic construct; identical to SEQ ID NO: 9
  SITE 2: note = 2-aminoisobutyric acid
  SITE 6: note = (S)-2-amino-3-(2-fluorophenyl)-2-methylpropanoic acid
  SITE 11: note = 2-aminoisobutyric acid
  SITE 13: note = Alpha-methyl-L-leucine
  SITE 16: note = Ornithine
  SITE 20: note = 2-aminoisobutyric acid
  SITE 25: note = Alpha-methyl-L-tyrosine

SEQ ID NO: 11 - protein, 41 aa, synthetic construct
  SITE 2: note = 2-aminoisobutyric acid
  SITE 6: note = (S)-2-amino-3-(2-fluorophenyl)-2-methylpropanoic acid
  SITE 10: note = 3-(4-pyridyl)-L-alanine
  SITE 13: note = Alpha-methyl-L-leucine
  SITE 20: note = 2-aminoisobutyric acid
  SITE 25: note = Alpha-methyl-L-tyrosine
YXEGTXTSDXSIXLDEKAQXEFIKXLIEGSPSSGAPPPSGS

SEQ ID NO: 12 - protein, 41 aa, synthetic construct
  SITE 2: note = 2-aminoisobutyric acid
  SITE 6: note = (S)-2-amino-3-(2-fluorophenyl)-2-methylpropanoic acid
  SITE 10: note = 3-(4-pyridyl)-L-alanine
  SITE 13: note = Alpha-methyl-L-leucine
  SITE 20: note = 2-aminoisobutyric acid
  SITE 24: note = D-Glutamic acid
  SITE 25: note = Alpha-methyl-L-tyrosine
YXEGTXTSDXSIXLDEKAQXEFIEXLIKGSPSSGAPPPSGS

SEQ ID NO: 13 - protein, 30 aa, synthetic construct
  SITE 2: note = 2-aminoisobutyric acid
  SITE 6: note = (S)-2-amino-3-(2-fluorophenyl)-2-methylpropanoic acid
  SITE 10: note = 3-(4-pyridyl)-L-alanine
  SITE 13: note = Alpha-methyl-L-leucine
  SITE 20: note = 2-aminoisobutyric acid
  SITE 24: note = D-Glutamic acid
  SITE 25: note = Alpha-methyl-L-tyrosine
YXEGTXTSDXSIXLDEKAQXEFIEXLIEGG

SEQ ID NO: 14 - protein, 29 aa, synthetic construct
  SITE 2: note = 2-aminoisobutyric acid
  SITE 6: note = (S)-2-amino-3-(2-fluorophenyl)-2-methylpropanoic acid
  SITE 10: note = 3-(4-pyridyl)-L-alanine
  SITE 13: note = Alpha-methyl-L-leucine
  SITE 20: note = 2-aminoisobutyric acid
  SITE 24: note = D-Glutamic acid
  SITE 25: note = Alpha-methyl-L-tyrosine
YXEGTXTSDXSIXLDEKAQXEFIEXLIEG

SEQ ID NO: 15 - protein, 31 aa, synthetic construct; identical to SEQ ID NO: 3
  SITE 2: note = 2-aminoisobutyric acid
  SITE 6: note = (S)-2-amino-3-(2-fluorophenyl)-2-methylpropanoic acid
  SITE 10: note = 3-(4-pyridyl)-L-alanine
  SITE 13: note = Alpha-methyl-L-leucine
  SITE 20: note = 2-aminoisobutyric acid
  SITE 25: note = Alpha-methyl-L-tyrosine

SEQ ID NO: 16 - protein, 31 aa, synthetic construct
  SITE 2: note = 2-aminoisobutyric acid
  SITE 6: note = (S)-2-amino-3-(2-fluorophenyl)-2-methylpropanoic acid
  SITE 10: note = 3-(4-pyridyl)-L-alanine
  SITE 11: note = 2-aminoisobutyric acid
  SITE 13: note = Alpha-methyl-L-leucine
  SITE 20: note = 2-aminoisobutyric acid
  SITE 25: note = Alpha-methyl-L-tyrosine
YXEGTXTSDXXIXLDEKAQXEFIEXLIEGGG

SEQ ID NO: 17 - protein, 31 aa, synthetic construct
  SITE 2: note = 2-aminoisobutyric acid
  SITE 6: note = (S)-2-amino-3-(2-fluorophenyl)-2-methylpropanoic acid
  SITE 10: note = 3-(4-pyridyl)-L-alanine
  SITE 13: note = Alpha-methyl-L-leucine
  SITE 20: note = 2-aminoisobutyric acid
  SITE 25: note = Alpha-methyl-L-tyrosine
YXEGTXTSDXSIXLEEKAQXEFIEXLIEGGG

SEQ ID NO: 18 - protein, 31 aa, synthetic construct
  SITE 2: note = 2-aminoisobutyric acid
  SITE 6: note = (S)-2-amino-3-(2-fluorophenyl)-2-methylpropanoic acid
  SITE 11: note = 2-aminoisobutyric acid
  SITE 13: note = Alpha-methyl-L-leucine
  SITE 20: note = 2-aminoisobutyric acid
  SITE 24: note = D-Glutamic acid
  SITE 25: note = Alpha-methyl-L-tyrosine
YXEGTXTSDVXIXLDEKAQXEFIEXLIEGGG

SEQ ID NO: 19 - protein, 31 aa, synthetic construct
  SITE 2: note = 2-aminoisobutyric acid
  SITE 6: note = (S)-2-amino-3-(2-fluorophenyl)-2-methylpropanoic acid
  SITE 11: note = 2-aminoisobutyric acid
  SITE 13: note = Alpha-methyl-L-leucine
  SITE 16: note = Ornithine
  SITE 20: note = 2-aminoisobutyric acid
  SITE 24: note = D-Glutamic acid
  SITE 25: note = Alpha-methyl-L-tyrosine
YXEGTXTSDVXIXLDXKAQXEFIEXLIEGGG

SEQ ID NO: 20 - protein, 31 aa, synthetic construct; identical to SEQ ID NO: 19
  SITE 2: note = 2-aminoisobutyric acid
  SITE 6: note = (S)-2-amino-3-(2-fluorophenyl)-2-methylpropanoic acid
  SITE 11: note = 2-aminoisobutyric acid
  SITE 13: note = Alpha-methyl-L-leucine
  SITE 16: note = Ornithine
  SITE 20: note = 2-aminoisobutyric acid
  SITE 25: note = Alpha-methyl-L-tyrosine

SEQ ID NO: 21 - protein, 31 aa, synthetic construct
  SITE 2: note = 2-aminoisobutyric acid
  SITE 6: note = (S)-2-amino-3-(2-fluorophenyl)-2-methylpropanoic acid
  SITE 10: note = 3-(4-pyridyl)-L-alanine
  SITE 13: note = Alpha-methyl-L-leucine
  SITE 16: note = Ornithine
  SITE 20: note = 2-aminoisobutyric acid
  SITE 25: note = Alpha-methyl-L-tyrosine
YXEGTXTSDXSIXLDXKAQXEFIEXLIEGGG

SEQ ID NO: 22 - protein, 31 aa, synthetic construct
  SITE 2: note = 2-aminoisobutyric acid
  SITE 6: note = (S)-2-amino-3-(2-fluorophenyl)-2-methylpropanoic acid
  SITE 10: note = 3-(4-pyridyl)-L-alanine
  SITE 11: note = 2-aminoisobutyric acid
  SITE 13: note = Alpha-methyl-L-leucine
  SITE 16: note = Ornithine
  SITE 20: note = 2-aminoisobutyric acid
  SITE 25: note = Alpha-methyl-L-tyrosine
YXEGTXTSDXXIXLDXKAQXEFIEXLIEGGG

SEQ ID NO: 23 - protein, 31 aa, synthetic construct
  SITE 2: note = 2-aminoisobutyric acid
  SITE 6: note = (S)-2-amino-3-(2-fluorophenyl)-2-methylpropanoic acid
  SITE 10: note = 3-(4-pyridyl)-L-alanine
  SITE 13: note = Alpha-methyl-L-leucine
  SITE 16: note = Ornithine
  SITE 20: note = 2-aminoisobutyric acid
  SITE 25: note = Alpha-methyl-L-tyrosine
YXEGTXTSDXSIXLEXKAQXEFIEXLIEGGG

SEQ ID NO: 24 - protein, 41 aa, synthetic construct; identical to SEQ ID NO: 12
  SITE 2: note = 2-aminoisobutyric acid
  SITE 6: note = (S)-2-amino-3-(2-fluorophenyl)-2-methylpropanoic acid
  SITE 10: note = 3-(4-pyridyl)-L-alanine
  SITE 13: note = Alpha-methyl-L-leucine
  SITE 20: note = 2-aminoisobutyric acid
  SITE 25: note = Alpha-methyl-L-tyrosine

SEQ ID NO: 25 - protein, 39 aa, synthetic construct
  SITE 2: note = 2-aminoisobutyric acid
  SITE 6: note = (S)-2-amino-3-(2-fluorophenyl)-2-methylpropanoic acid
  SITE 10: note = 3-(4-pyridyl)-L-alanine
  SITE 13: note = Alpha-methyl-L-leucine
  SITE 16: note = Ornithine
  SITE 20: note = 2-aminoisobutyric acid
  SITE 25: note = Alpha-methyl-L-tyrosine
YXEGTXTSDXSIXLEXKAQXEFIEXLIEGSPSSGAPPPS

SEQ ID NO: 26 - protein, 31 aa, synthetic construct
  SITE 2: note = 2-aminoisobutyric acid
  SITE 6: note = (S)-2-amino-3-(2-fluorophenyl)-2-methylpropanoic acid
  SITE 10: note = 3-(4-pyridyl)-L-alanine
  SITE 11: note = 2-aminoisobutyric acid
  SITE 13: note = Alpha-methyl-L-leucine
  SITE 16: note = Ornithine
  SITE 20: note = 2-aminoisobutyric acid
  SITE 25: note = Alpha-methyl-L-tyrosine
YXEGTXTSDXXIXLEXKAQXEFIEXLIEGGG

SEQ ID NO: 27 - protein, 31 aa, synthetic construct; identical to SEQ ID NO: 22
  SITE 2: note = 2-aminoisobutyric acid
  SITE 6: note = (S)-2-amino-3-(2-fluorophenyl)-2-methylpropanoic acid
  SITE 10: note = 3-(4-pyridyl)-L-alanine
  SITE 11: note = 2-aminoisobutyric acid
  SITE 13: note = Alpha-methyl-L-leucine
  SITE 16: note = Ornithine
  SITE 20: note = 2-aminoisobutyric acid
  SITE 24: note = D-Glutamic acid
  SITE 25: note = Alpha-methyl-L-tyrosine

SEQ ID NO: 28 - protein, 41 aa, synthetic construct
  SITE 2: note = 2-aminoisobutyric acid
  SITE 6: note = (S)-2-amino-3-(2-fluorophenyl)-2-methylpropanoic acid
  SITE 10: note = 3-(4-pyridyl)-L-alanine
  SITE 13: note = Alpha-methyl-L-leucine
  SITE 16: note = Ornithine
  SITE 20: note = 2-aminoisobutyric acid
  SITE 25: note = Alpha-methyl-L-tyrosine
YXEGTXTSDXSIXLDXKAQXEFIKXLIEGSPSSGAPPPSGS

SEQ ID NO: 29 - protein, 41 aa, synthetic construct
  SITE 2: note = 2-aminoisobutyric acid
  SITE 6: note = (S)-2-amino-3-(2-fluorophenyl)-2-methylpropanoic acid
  SITE 10: note = 3-(4-pyridyl)-L-alanine
  SITE 11: note = 2-aminoisobutyric acid
  SITE 13: note = Alpha-methyl-L-leucine
  SITE 16: note = Ornithine
  SITE 20: note = 2-aminoisobutyric acid
  SITE 25: note = Alpha-methyl-L-tyrosine
YXEGTXTSDXXIXLDXKAQXEFIKXLIEGSPSSGAPPPSGS

SEQ ID NO: 30 - protein, 40 aa, synthetic construct
  SITE 2: note = 2-aminoisobutyric acid
  SITE 6: note = (S)-2-amino-3-(2-fluorophenyl)-2-methylpropanoic acid
  SITE 10: note = 3-(4-pyridyl)-L-alanine
  SITE 11: note = 2-aminoisobutyric acid
  SITE 13: note = Alpha-methyl-L-leucine
  SITE 16: note = Ornithine
  SITE 20: note = 2-aminoisobutyric acid
  SITE 25: note = Alpha-methyl-L-tyrosine
YXEGTXTSDXXIXLDXKAQXEFIEXLIEGGPSSGAPPPSG

SEQ ID NO: 31 - protein, 40 aa, synthetic construct
  SITE 2: note = 2-aminoisobutyric acid
  SITE 6: note = (S)-2-amino-3-(2-fluorophenyl)-2-methylpropanoic acid
  SITE 10: note = 3-(4-pyridyl)-L-alanine
  SITE 11: note = 2-aminoisobutyric acid
  SITE 13: note = Alpha-methyl-L-leucine
  SITE 16: note = Ornithine
  SITE 20: note = 2-aminoisobutyric acid
  SITE 25: note = Alpha-methyl-L-tyrosine
YXEGTXTSDXXIXLDXKAQXEFIEXLIEGGESSGAPPPSG

SEQ ID NO: 32 - protein, 40 aa, synthetic construct
  SITE 2: note = 2-aminoisobutyric acid
  SITE 6: note = (S)-2-amino-3-(2-fluorophenyl)-2-methylpropanoic acid
  SITE 10: note = 3-(4-pyridyl)-L-alanine
  SITE 11: note = 2-aminoisobutyric acid
  SITE 13: note = Alpha-methyl-L-leucine
  SITE 16: note = Ornithine
  SITE 20: note = 2-aminoisobutyric acid
  SITE 25: note = Alpha-methyl-L-tyrosine
  SITE 31: note = Ornithine
YXEGTXTSDXXIXLDXKAQXEFIEXLIEGGXSSGAPPPSG

SEQ ID NO: 33 - protein, 40 aa, synthetic construct
  SITE 2: note = 2-aminoisobutyric acid
  SITE 6: note = (S)-2-amino-3-(2-fluorophenyl)-2-methylpropanoic acid
  SITE 10: note = 3-(4-pyridyl)-L-alanine
  SITE 11: note = 2-aminoisobutyric acid
  SITE 13: note = Alpha-methyl-L-leucine
  SITE 16: note = Ornithine
  SITE 20: note = 2-aminoisobutyric acid
  SITE 25: note = Alpha-methyl-L-tyrosine
YXEGTXTSDXXIXLDXKAQXEFIEXLIEGGPPSGAPPPSG

SEQ ID NO: 34 - protein, 40 aa, synthetic construct
  SITE 2: note = 2-aminoisobutyric acid
  SITE 6: note = (S)-2-amino-3-(2-fluorophenyl)-2-methylpropanoic acid
  SITE 10: note = 3-(4-pyridyl)-L-alanine
  SITE 11: note = 2-aminoisobutyric acid
  SITE 13: note = Alpha-methyl-L-leucine
  SITE 16: note = Ornithine
  SITE 20: note = 2-aminoisobutyric acid
  SITE 25: note = Alpha-methyl-L-tyrosine
  SITE 34: note = 2-aminoisobutyric acid
  SITE 35: note = Ornithine
  SITE 39: note = Ornithine
YXEGTXTSDXXIXLDXKAQXEFIEXLIEGGPPSXXPPPXG

SEQ ID NO: 35 - protein, 40 aa, synthetic construct
  SITE 2: note = 2-aminoisobutyric acid
  SITE 6: note = (S)-2-amino-3-(2-fluorophenyl)-2-methylpropanoic acid
  SITE 10: note = 3-(4-pyridyl)-L-alanine
  SITE 11: note = 2-aminoisobutyric acid
  SITE 13: note = Alpha-methyl-L-leucine
  SITE 16: note = Ornithine
  SITE 20: note = 2-aminoisobutyric acid
  SITE 25: note = Alpha-methyl-L-tyrosine
YXEGTXTSDXXIXLDXKAQXEFIEXLIEGSPSSGAPPPGG

SEQ ID NO: 36 - protein, 41 aa, synthetic construct
  SITE 2: note = 2-aminoisobutyric acid
  SITE 6: note = (S)-2-amino-3-(2-fluorophenyl)-2-methylpropanoic acid
  SITE 10: note = 3-(4-pyridyl)-L-alanine
  SITE 11: note = 2-aminoisobutyric acid
  SITE 13: note = Alpha-methyl-L-leucine
  SITE 16: note = Ornithine
  SITE 20: note = 2-aminoisobutyric acid
  SITE 25: note = Alpha-methyl-L-tyrosine
YXEGTXTSDXXIXLDXKAQXEFIKXLIEGGPSSGAPPPSGG

SEQ ID NO: 37 - protein, 41 aa, synthetic construct
  SITE 2: note = 2-aminoisobutyric acid
  SITE 6: note = (S)-2-amino-3-(2-fluorophenyl)-2-methylpropanoic acid
  SITE 10: note = 3-(4-pyridyl)-L-alanine
  SITE 11: note = 2-aminoisobutyric acid
  SITE 13: note = Alpha-methyl-L-leucine
  SITE 16: note = Ornithine
  SITE 20: note = 2-aminoisobutyric acid
  SITE 25: note = Alpha-methyl-L-tyrosine
YXEGTXTSDXXIXLDXKAQXEFIKXLIEGGESSGAPPPSGG

SEQ ID NO: 38 - protein, 41 aa, synthetic construct
  SITE 2: note = 2-aminoisobutyric acid
  SITE 6: note = (S)-2-amino-3-(2-fluorophenyl)-2-methylpropanoic acid
  SITE 10: note = 3-(4-pyridyl)-L-alanine
  SITE 11: note = 2-aminoisobutyric acid
  SITE 13: note = Alpha-methyl-L-leucine
  SITE 16: note = Ornithine
  SITE 20: note = 2-aminoisobutyric acid
  SITE 25: note = Alpha-methyl-L-tyrosine
  SITE 31: note = Ornithine
YXEGTXTSDXXIXLDXKAQXEFIKXLIEGGXSSGAPPPSGG

SEQ ID NO: 39 - protein, 41 aa, synthetic construct
  SITE 2: note = 2-aminoisobutyric acid
  SITE 6: note = (S)-2-amino-3-(2-fluorophenyl)-2-methylpropanoic acid
  SITE 10: note = 3-(4-pyridyl)-L-alanine
  SITE 11: note = 2-aminoisobutyric acid
  SITE 13: note = Alpha-methyl-L-leucine
  SITE 16: note = Ornithine
  SITE 20: note = 2-aminoisobutyric acid
  SITE 25: note = Alpha-methyl-L-tyrosine
YXEGTXTSDXXIXLDXKAQXEFIKXLIEGGPPSGAPPPSGG

SEQ ID NO: 40 - protein, 41 aa, synthetic construct
  SITE 2: note = 2-aminoisobutyric acid
  SITE 6: note = (S)-2-amino-3-(2-fluorophenyl)-2-methylpropanoic acid
  SITE 10: note = 3-(4-pyridyl)-L-alanine
  SITE 11: note = 2-aminoisobutyric acid
  SITE 13: note = Alpha-methyl-L-leucine
  SITE 16: note = Ornithine
  SITE 20: note = 2-aminoisobutyric acid
  SITE 25: note = Alpha-methyl-L-tyrosine
  SITE 34: note = 2-aminoisobutyric acid
  SITE 35: note = Ornithine
  SITE 39: note = Ornithine
YXEGTXTSDXXIXLDXKAQXEFIKXLIEGGPPSXXPPPXGG

SEQ ID NO: 41 - protein, 41 aa, synthetic construct
  SITE 2: note = 2-aminoisobutyric acid
  SITE 6: note = (S)-2-amino-3-(2-fluorophenyl)-2-methylpropanoic acid
  SITE 10: note = 3-(4-pyridyl)-L-alanine
  SITE 11: note = 2-aminoisobutyric acid
  SITE 13: note = Alpha-methyl-L-leucine
  SITE 16: note = Ornithine
  SITE 20: note = 2-aminoisobutyric acid
  SITE 25: note = Alpha-methyl-L-tyrosine
YXEGTXTSDXXIXLDXKAQXEFIKXLIEGSPSSGAPPPGGG

SEQ ID NO: 42 - protein, 34 aa, synthetic construct
  SITE 2: note = 2-aminoisobutyric acid
  SITE 6: note = (S)-2-amino-3-(2-fluorophenyl)-2-methylpropanoic acid
  SITE 10: note = 3-(4-pyridyl)-L-alanine
  SITE 11: note = 2-aminoisobutyric acid
  SITE 13: note = Alpha-methyl-L-leucine
  SITE 16: note = Ornithine
  SITE 20: note = 2-aminoisobutyric acid
  SITE 25: note = Alpha-methyl-L-tyrosine
YXEGTXTSDXXIXLDXKAQXEFIEXLIEGGPSSG

SEQ ID NO: 43 - protein, 31 aa, synthetic construct
  SITE 2: note = 2-aminoisobutyric acid
  SITE 6: note = (S)-2-amino-3-(2-fluorophenyl)-2-methylpropanoic acid
  SITE 10: note = 3-(4-pyridyl)-L-alanine
  SITE 11: note = 2-aminoisobutyric acid
  SITE 13: note = Alpha-methyl-L-leucine
  SITE 16: note = Ornithine
  SITE 20: note = 2-aminoisobutyric acid
  SITE 25: note = Alpha-methyl-L-tyrosine
YXEGTXTSDXXIXLDXKAQXEFIKXLIEGGG

SEQ ID NO: 44 - protein, 34 aa, synthetic construct
  SITE 2: note = 2-aminoisobutyric acid
  SITE 6: note = (S)-2-amino-3-(2-fluorophenyl)-2-methylpropanoic acid
  SITE 10: note = 3-(4-pyridyl)-L-alanine
  SITE 11: note = 2-aminoisobutyric acid
  SITE 13: note = Alpha-methyl-L-leucine
  SITE 16: note = Ornithine
  SITE 20: note = 2-aminoisobutyric acid
  SITE 25: note = Alpha-methyl-L-tyrosine
YXEGTXTSDXXIXLDXKAQXEFIKXLIEGGPSSG

SEQ ID NO: 45 - protein, 31 aa, synthetic construct
  SITE 2: note = 2-aminoisobutyric acid
  SITE 6: note = (S)-2-amino-3-(2-fluorophenyl)-2-methylpropanoic acid
  SITE 10: note = 3-(4-pyridyl)-L-alanine
  SITE 11: note = 2-aminoisobutyric acid
  SITE 13: note = Alpha-methyl-L-leucine
  SITE 16: note = Ornithine
  SITE 20: note = 2-aminoisobutyric acid
  SITE 25: note = Alpha-methyl-L-tyrosine
YXEGTXTSDXXIXLDXKAQXEFIEXLIKGGG

SEQ ID NO: 46 - protein, 34 aa, synthetic construct
  SITE 2: note = 2-aminoisobutyric acid
  SITE 6: note = (S)-2-amino-3-(2-fluorophenyl)-2-methylpropanoic acid
  SITE 10: note = 3-(4-pyridyl)-L-alanine
  SITE 11: note = 2-aminoisobutyric acid
  SITE 13: note = Alpha-methyl-L-leucine
  SITE 16: note = Ornithine
  SITE 20: note = 2-aminoisobutyric acid
  SITE 25: note = Alpha-methyl-L-tyrosine
YXEGTXTSDXXIXLDXKAQXEFIEXLIKGGPSSG

SEQ ID NO: 47 - protein, 39 aa, synthetic construct
  SITE 2: note = 2-aminoisobutyric acid
  SITE 6: note = (S)-2-amino-3-(2-fluorophenyl)-2-methylpropanoic acid
  SITE 10: note = 3-(4-pyridyl)-L-alanine
  SITE 11: note = 2-aminoisobutyric acid
  SITE 13: note = Alpha-methyl-L-leucine
  SITE 16: note = Ornithine
  SITE 20: note = 2-aminoisobutyric acid
  SITE 25: note = Alpha-methyl-L-tyrosine
YXEGTXTSDXXIXLDXKAQXEFIEXLIEGSPSSGAPPPS

SEQ ID NO: 48 - protein, 39 aa, synthetic construct
  SITE 2: note = 2-aminoisobutyric acid
  SITE 6: note = (S)-2-amino-3-(2-fluorophenyl)-2-methylpropanoic acid
  SITE 10: note = 3-(4-pyridyl)-L-alanine
  SITE 11: note = 2-aminoisobutyric acid
  SITE 13: note = Alpha-methyl-L-leucine
  SITE 16: note = Ornithine
  SITE 20: note = 2-aminoisobutyric acid
  SITE 25: note = Alpha-methyl-L-tyrosine
YXEGTXTSDXXIXLDXKAQXEFIEXLIEGGPSSGAPPPS

SEQ ID NO: 49 - protein, 39 aa, synthetic construct
  SITE 2: note = 2-aminoisobutyric acid
  SITE 6: note = (S)-2-amino-3-(2-fluorophenyl)-2-methylpropanoic acid
  SITE 10: note = 3-(4-pyridyl)-L-alanine
  SITE 11: note = 2-aminoisobutyric acid
  SITE 13: note = Alpha-methyl-L-leucine
  SITE 20: note = 2-aminoisobutyric acid
  SITE 25: note = Alpha-methyl-L-tyrosine
YXEGTXTSDXXIXLDEKAQXEFIEXLIEGGPSSGAPPPS

SEQ ID NO: 50 - protein, 39 aa, synthetic construct; identical to SEQ ID NO: 47
  SITE 2: note = 2-aminoisobutyric acid
  SITE 6: note = (S)-2-amino-3-(2-fluorophenyl)-2-methylpropanoic acid
  SITE 10: note = 3-(4-pyridyl)-L-alanine
  SITE 11: note = 2-aminoisobutyric acid
  SITE 13: note = Alpha-methyl-L-leucine
  SITE 16: note = Ornithine
  SITE 20: note = 2-aminoisobutyric acid
  SITE 24: note = D-Glutamic acid
  SITE 25: note = Alpha-methyl-L-tyrosine

SEQ ID NO: 51 - protein, 39 aa, synthetic construct
  SITE 2: note = 2-aminoisobutyric acid
  SITE 6: note = (S)-2-amino-3-(2-fluorophenyl)-2-methylpropanoic acid
  SITE 10: note = 3-(4-pyridyl)-L-alanine
  SITE 11: note = 2-aminoisobutyric acid
  SITE 13: note = Alpha-methyl-L-leucine
  SITE 16: note = Ornithine
  SITE 20: note = 2-aminoisobutyric acid
  SITE 25: note = Alpha-methyl-L-tyrosine
  SITE 31: note = Ornithine
YXEGTXTSDXXIXLDXKAQXEFIEXLIEGGXSSGAPPPS

SEQ ID NO: 52 - protein, 31 aa, synthetic construct
  SITE 2: note = 2-aminoisobutyric acid
  SITE 6: note = (S)-2-amino-3-(2-fluorophenyl)-2-methylpropanoic acid
  SITE 10: note = 3-(4-pyridyl)-L-alanine
  SITE 11: note = 2-aminoisobutyric acid
  SITE 13: note = Alpha-methyl-L-leucine
  SITE 16: note = Ornithine
  SITE 20: note = 2-aminoisobutyric acid
  SITE 25: note = Alpha-methyl-L-tyrosine
  SITE 31: note = Ornithine
YXEGTXTSDXXIXLDXKAQXEFIEXLIEGGX

SEQ ID NO: 53 - protein, 39 aa, synthetic construct
  SITE 2: note = 2-aminoisobutyric acid
  SITE 6: note = (S)-2-amino-3-(2-fluorophenyl)-2-methylpropanoic acid
  SITE 10: note = 3-(4-pyridyl)-L-alanine
  SITE 11: note = 2-aminoisobutyric acid
  SITE 13: note = Alpha-methyl-L-leucine
  SITE 16: note = Ornithine
  SITE 20: note = 2-aminoisobutyric acid
  SITE 21: note = Ornithine
  SITE 25: note = Alpha-methyl-L-tyrosine
YXEGTXTSDXXIXLDXKAQXXFIEXLIEGSPSSGAPPPS

SEQ ID NO: 54 - protein, 39 aa, synthetic construct
  SITE 2: note = 2-aminoisobutyric acid
  SITE 6: note = (S)-2-amino-3-(2-fluorophenyl)-2-methylpropanoic acid
  SITE 10: note = 3-(4-pyridyl)-L-alanine
  SITE 11: note = 2-aminoisobutyric acid
  SITE 13: note = Alpha-methyl-L-leucine
  SITE 16: note = Ornithine
  SITE 20: note = 2-aminoisobutyric acid
  SITE 25: note = Alpha-methyl-L-tyrosine
YXEGTXTSDXXIXLDXKAQXEFIQXLIEGSPSSGAPPPS

SEQ ID NO: 55 - protein, 39 aa, synthetic construct; identical to SEQ ID NO: 2
  SITE 2: note = 2-aminoisobutyric acid
  SITE 6: note = (S)-2-amino-3-(2-fluorophenyl)-2-methylpropanoic acid
  SITE 10: note = 3-(4-pyridyl)-L-alanine
  SITE 13: note = Alpha-methyl-L-leucine
  SITE 16: note = Ornithine
  SITE 20: note = 2-aminoisobutyric acid
  SITE 25: note = Alpha-methyl-L-tyrosine

SEQ ID NO: 56 - protein, 39 aa, synthetic construct
  SITE 2: note = 2-aminoisobutyric acid
  SITE 6: note = (S)-2-amino-3-(2-fluorophenyl)-2-methylpropanoic acid
  SITE 10: note = 3-(4-pyridyl)-L-alanine
  SITE 11: note = 2-aminoisobutyric acid
  SITE 13: note = Alpha-methyl-L-leucine
  SITE 16: note = Ornithine
  SITE 20: note = 2-aminoisobutyric acid
  SITE 25: note = Alpha-methyl-L-tyrosine
  SITE 29: note = 2-aminoisobutyric acid
YXEGTXTSDXXIXLDXKAQXEFIEXLIEXSPSSGAPPPS

SEQ ID NO: 57 - protein, 39 aa, synthetic construct; identical to SEQ ID NO: 56
  SITE 2: note = 2-aminoisobutyric acid
  SITE 6: note = (S)-2-amino-3-(2-fluorophenyl)-2-methylpropanoic acid
  SITE 10: note = 3-(4-pyridyl)-L-alanine
  SITE 11: note = 2-aminoisobutyric acid
  SITE 13: note = Alpha-methyl-L-leucine
  SITE 16: note = Ornithine
  SITE 20: note = 2-aminoisobutyric acid
  SITE 24: note = D-Glutamic acid
  SITE 25: note = Alpha-methyl-L-tyrosine
  SITE 29: note = 2-aminoisobutyric acid

SEQ ID NO: 58 - protein, 39 aa, synthetic construct
  SITE 2: note = 2-aminoisobutyric acid
  SITE 6: note = (S)-2-amino-3-(2-fluorophenyl)-2-methylpropanoic acid
  SITE 10: note = 3-(4-pyridyl)-L-alanine
  SITE 13: note = Alpha-methyl-L-leucine
  SITE 16: note = Ornithine
  SITE 20: note = 2-aminoisobutyric acid
  SITE 25: note = Alpha-methyl-L-tyrosine
YXEGTXTSDXSIXLDXKAQXEFIQXLIEGSPSSGAPPPS

SEQ ID NO: 59 - protein, 39 aa, synthetic construct
  SITE 2: note = 2-aminoisobutyric acid
  SITE 6: note = (S)-2-amino-3-(2-fluorophenyl)-2-methylpropanoic acid
  SITE 11: note = 2-aminoisobutyric acid
  SITE 13: note = Alpha-methyl-L-leucine
  SITE 16: note = Ornithine
  SITE 20: note = 2-aminoisobutyric acid
  SITE 25: note = Alpha-methyl-L-tyrosine
YXEGTXTSDYXIXLDXKAQXEFIEXLIEGSPSSGAPPPS

SEQ ID NO: 60 - protein, 39 aa, synthetic construct
  SITE 2: note = 2-aminoisobutyric acid
  SITE 6: note = (S)-2-amino-3-(2-fluorophenyl)-2-methylpropanoic acid
  SITE 11: note = 2-aminoisobutyric acid
  SITE 13: note = Alpha-methyl-L-leucine
  SITE 16: note = Ornithine
  SITE 20: note = 2-aminoisobutyric acid
  SITE 25: note = Alpha-methyl-L-tyrosine
YXEGTXTSDYXIXLDXKAQXEFIQXLIEGSPSSGAPPPS

SEQ ID NO: 61 - protein, 39 aa, synthetic construct; identical to SEQ ID NO: 59
  SITE 2: note = 2-aminoisobutyric acid
  SITE 6: note = (S)-2-amino-3-(2-fluorophenyl)-2-methylpropanoic acid
  SITE 11: note = 2-aminoisobutyric acid
  SITE 13: note = Alpha-methyl-L-leucine
  SITE 16: note = Ornithine
  SITE 20: note = 2-aminoisobutyric acid
  SITE 24: note = D-Glutamic acid
  SITE 25: note = Alpha-methyl-L-tyrosine

SEQ ID NO: 62 - protein, 39 aa, synthetic construct; identical to SEQ ID NO: 47
  SITE 2: note = 2-aminoisobutyric acid
  SITE 6: note = (S)-2-amino-3-(2-fluorophenyl)-2-methylpropanoic acid
  SITE 10: note = 3-(4-pyridyl)-L-alanine
  SITE 11: note = 2-aminoisobutyric acid
  SITE 13: note = Alpha-methyl-L-leucine
  SITE 16: note = Ornithine
  SITE 20: note = Alpha-methyl-L-leucine
  SITE 25: note = Alpha-methyl-L-tyrosine

SEQ ID NO: 63 - protein, 39 aa, synthetic construct; identical to SEQ ID NO: 47
  SITE 2: note = 2-aminoisobutyric acid
  SITE 6: note = (S)-2-amino-3-(2-fluorophenyl)-2-methylpropanoic acid
  SITE 10: note = 3-(4-pyridyl)-L-alanine
  SITE 11: note = 2-aminoisobutyric acid
  SITE 13: note = Alpha-methyl-L-leucine
  SITE 16: note = Ornithine
  SITE 20: note = L-isovaline
  SITE 25: note = Alpha-methyl-L-tyrosine

SEQ ID NO: 64 - protein, 39 aa, synthetic construct; identical to SEQ ID NO: 54
  SITE 2: note = 2-aminoisobutyric acid
  SITE 6: note = (S)-2-amino-3-(2-fluorophenyl)-2-methylpropanoic acid
  SITE 10: note = 3-(4-pyridyl)-L-alanine
  SITE 11: note = 2-aminoisobutyric acid
  SITE 13: note = Alpha-methyl-L-leucine
  SITE 16: note = Ornithine
  SITE 20: note = Alpha-methyl-L-leucine
  SITE 25: note = Alpha-methyl-L-tyrosine

SEQ ID NO: 65 - protein, 39 aa, synthetic construct; identical to SEQ ID NO: 54
  SITE 2: note = 2-aminoisobutyric acid
  SITE 6: note = (S)-2-amino-3-(2-fluorophenyl)-2-methylpropanoic acid
  SITE 10: note = 3-(4-pyridyl)-L-alanine
  SITE 11: note = 2-aminoisobutyric acid
  SITE 13: note = Alpha-methyl-L-leucine
  SITE 16: note = Ornithine
  SITE 20: note = L-isovaline
  SITE 25: note = Alpha-methyl-L-tyrosine

SEQ ID NO: 66 - protein, 39 aa, synthetic construct
  SITE 2: note = 2-aminoisobutyric acid
  SITE 6: note = (S)-2-amino-3-(2-fluorophenyl)-2-methylpropanoic acid
  SITE 10: note = 3-(4-pyridyl)-L-alanine
  SITE 11: note = 2-aminoisobutyric acid
  SITE 13: note = Alpha-methyl-L-leucine
  SITE 16: note = Ornithine
  SITE 20: note = 2-aminoisobutyric acid
  SITE 25: note = Alpha-methyl-L-tyrosine
YXEGTXTSDXXIXLDXKAQXQFIEXLIEGSPSSGAPPPS

SEQ ID NO: 67 - protein, 39 aa, synthetic construct
  SITE 2: note = 2-aminoisobutyric acid
  SITE 6: note = (S)-2-amino-3-(2-fluorophenyl)-2-methylpropanoic acid
  SITE 10: note = 3-(4-pyridyl)-L-alanine
  SITE 11: note = 2-aminoisobutyric acid
  SITE 13: note = Alpha-methyl-L-leucine
  SITE 16: note = Ornithine
  SITE 20: note = 2-aminoisobutyric acid
  SITE 25: note = Alpha-methyl-L-tyrosine
YXEGTXTSDXXIXLDXKAQXEFIQXLLEGSPSSGAPPPS

SEQ ID NO: 68 - protein, 31 aa, synthetic construct
  SITE 2: note = 2-aminoisobutyric acid
  SITE 6: note = (S)-2-amino-3-(2-fluorophenyl)-2-methylpropanoic acid
  SITE 10: note = 3-(4-pyridyl)-L-alanine
  SITE 13: note = Alpha-methyl-L-leucine
  SITE 16: note = Ornithine
  SITE 20: note = 2-aminoisobutyric acid
  SITE 25: note = Alpha-methyl-L-tyrosine
YXEGTXTSDXSIXLDXKAQXEFIQXLIEGGG

SEQ ID NO: 69 - protein, 31 aa, synthetic construct
  SITE 2: note = 2-aminoisobutyric acid
  SITE 6: note = (S)-2-amino-3-(2-fluorophenyl)-2-methylpropanoic acid
  SITE 10: note = 3-(4-pyridyl)-L-alanine
  SITE 11: note = 2-aminoisobutyric acid
  SITE 13: note = Alpha-methyl-L-leucine
  SITE 16: note = Ornithine
  SITE 20: note = 2-aminoisobutyric acid
  SITE 25: note = Alpha-methyl-L-tyrosine
YXEGTXTSDXXIXLDXKAQXEFIQXLIEGGG

SEQ ID NO: 70 - protein, 39 aa, synthetic construct
  SITE 2: note = 2-aminoisobutyric acid
  SITE 6: note = (S)-2-amino-3-(2-fluorophenyl)-2-methylpropanoic acid
  SITE 10: note = 3-(4-pyridyl)-L-alanine
  SITE 11: note = 2-aminoisobutyric acid
  SITE 13: note = Alpha-methyl-L-leucine
  SITE 16: note = Ornithine
  SITE 20: note = 2-aminoisobutyric acid
  SITE 25: note = Alpha-methyl-L-tyrosine
YXEGTXTSDXXIXLDXKAQXDFIQXLIEGSPSSGAPPPS

SEQ ID NO: 71 - protein, 39 aa, synthetic construct
  SITE 2: note = 2-aminoisobutyric acid
  SITE 6: note = (S)-2-amino-3-(2-fluorophenyl)-2-methylpropanoic acid
  SITE 10: note = 3-(4-pyridyl)-L-alanine
  SITE 13: note = Alpha-methyl-L-leucine
  SITE 16: note = Ornithine
  SITE 20: note = 2-aminoisobutyric acid
  SITE 25: note = Alpha-methyl-L-tyrosine
YXEGTXTSDXSIXLDXKAQXEFIKXLIEGSPSSGAPPPS

SEQ ID NO: 72 - protein, 39 aa, synthetic construct
  SITE 2: note = 2-aminoisobutyric acid
  SITE 6: note = (S)-2-amino-3-(2-fluorophenyl)-2-methylpropanoic acid
  SITE 10: note = 3-(4-pyridyl)-L-alanine
  SITE 11: note = 2-aminoisobutyric acid
  SITE 13: note = Alpha-methyl-L-leucine
  SITE 16: note = Ornithine
  SITE 20: note = 2-aminoisobutyric acid
  SITE 25: note = Alpha-methyl-L-tyrosine
YXEGTXTSDXXIXLDXKAQXEFIKXLIEGSPSSGAPPPS

SEQ ID NO: 73 - protein, 39 aa, synthetic construct
  SITE 2: note = 2-aminoisobutyric acid
  SITE 6: note = (S)-2-amino-3-(2-fluorophenyl)-2-methylpropanoic acid
  SITE 13: note = Alpha-methyl-L-leucine
  SITE 16: note = Ornithine
  SITE 20: note = 2-aminoisobutyric acid
  SITE 25: note = Alpha-methyl-L-tyrosine
YXEGTXTSDYSIXLDXKAQXEFIEXLIEGSPSSGAPPPS

SEQ ID NO: 74 - protein, 39 aa, synthetic construct
  SITE 2: note = 2-aminoisobutyric acid
  SITE 6: note = (S)-2-amino-3-(2-fluorophenyl)-2-methylpropanoic acid
  SITE 13: note = Alpha-methyl-L-leucine
  SITE 16: note = Ornithine
  SITE 20: note = 2-aminoisobutyric acid
  SITE 25: note = Alpha-methyl-L-tyrosine
YXEGTXTSDYSIXLDXKAQXEFIQXLIEGSPSSGAPPPS

SEQ ID NO: 75 - protein, 31 aa, synthetic construct
  SITE 2: note = 2-aminoisobutyric acid
  SITE 6: note = (S)-2-amino-3-(2-fluorophenyl)-2-methylpropanoic acid
  SITE 11: note = 2-aminoisobutyric acid
  SITE 13: note = Alpha-methyl-L-leucine
  SITE 16: note = Ornithine
  SITE 20: note = 2-aminoisobutyric acid
  SITE 25: note = Alpha-methyl-L-tyrosine
YXEGTXTSDYXIXLDXKAQXEFIEXLIEGGG

SEQ ID NO: 76 - protein, 31 aa, synthetic construct
  SITE 2: note = 2-aminoisobutyric acid
  SITE 6: note = (S)-2-amino-3-(2-fluorophenyl)-2-methylpropanoic acid
  SITE 10: note = 3-(4-pyridyl)-L-alanine
  SITE 13: note = Alpha-methyl-L-leucine
  SITE 16: note = Ornithine
  SITE 20: note = 2-aminoisobutyric acid
  SITE 25: note = Alpha-methyl-L-tyrosine
HXEGTXTSDXSIXLDXKAQXEFIEXLIEGGG

SEQ ID NO: 77 - protein, 39 aa, synthetic construct
  SITE 2: note = 2-aminoisobutyric acid
  SITE 6: note = (S)-2-amino-3-(2-fluorophenyl)-2-methylpropanoic acid
  SITE 10: note = 3-(4-pyridyl)-L-alanine
  SITE 13: note = Alpha-methyl-L-leucine
  SITE 16: note = Ornithine
  SITE 20: note = 2-aminoisobutyric acid
  SITE 25: note = Alpha-methyl-L-tyrosine
HXEGTXTSDXSIXLDXKAQXEFIEXLIEGSPSSGAPPPS

SEQ ID NO: 78 - protein, 31 aa, synthetic construct
  SITE 2: note = 2-aminoisobutyric acid
  SITE 6: note = (S)-2-amino-3-(2-fluorophenyl)-2-methylpropanoic acid
  SITE 10: note = 3-(4-pyridyl)-L-alanine
  SITE 11: note = 2-aminoisobutyric acid
  SITE 13: note = Alpha-methyl-L-leucine
  SITE 16: note = Ornithine
  SITE 20: note = 2-aminoisobutyric acid
  SITE 25: note = Alpha-methyl-L-tyrosine
YXEGTXTSDXXIXLDXKAQXEFIEXLIEQGG

SEQ ID NO: 79 - protein, 39 aa, synthetic construct
  SITE 2: note = 2-aminoisobutyric acid
  SITE 6: note = (S)-2-amino-3-(2-fluorophenyl)-2-methylpropanoic acid
  SITE 10: note = 3-(4-pyridyl)-L-alanine
  SITE 13: note = Alpha-methyl-L-leucine
  SITE 16: note = Ornithine
  SITE 20: note = 2-aminoisobutyric acid
  SITE 24: note = D-Glutamic acid
  SITE 25: note = Alpha-methyl-L-tyrosine
YXEGTXTSDXSIXLDXKAQXEFIEXLIEGGPSSGAPPPS

SEQ ID NO: 80 - protein, 39 aa, synthetic construct; identical to SEQ ID NO: 48
  SITE 2: note = 2-aminoisobutyric acid
  SITE 6: note = (S)-2-amino-3-(2-fluorophenyl)-2-methylpropanoic acid
  SITE 10: note = 3-(4-pyridyl)-L-alanine
  SITE 11: note = 2-aminoisobutyric acid
  SITE 13: note = Alpha-methyl-L-leucine
  SITE 16: note = Ornithine
  SITE 20: note = 2-aminoisobutyric acid
  SITE 24: note = D-Glutamic acid
  SITE 25: note = Alpha-methyl-L-tyrosine

SEQ ID NO: 81 - protein, 39 aa, synthetic construct
  SITE 2: note = 2-aminoisobutyric acid
  SITE 6: note = (S)-2-amino-3-(2-fluorophenyl)-2-methylpropanoic acid
  SITE 11: note = 2-aminoisobutyric acid
  SITE 13: note = Alpha-methyl-L-leucine
  SITE 16: note = Ornithine
  SITE 20: note = 2-aminoisobutyric acid
  SITE 24: note = D-Glutamic acid
  SITE 25: note = Alpha-methyl-L-tyrosine
YXEGTXTSDYXIXLDXKAQXEFIEXLIEGGPSSGAPPPS

SEQ ID NO: 82 - protein, 39 aa, synthetic construct
  SITE 2: note = 2-aminoisobutyric acid
  SITE 6: note = (S)-2-amino-3-(2-fluorophenyl)-2-methylpropanoic acid
  SITE 10: note = 3-(4-pyridyl)-L-alanine
  SITE 13: note = Alpha-methyl-L-leucine
  SITE 16: note = Ornithine
  SITE 20: note = 2-aminoisobutyric acid
  SITE 24: note = D-Glutamic acid
  SITE 25: note = Alpha-methyl-L-tyrosine
YXEGTXTSDXSIXLDXKAQXEFIEXLIAGSPSSGAPPPS

SEQ ID NO: 83 - protein, 39 aa, synthetic construct
  SITE 2: note = 2-aminoisobutyric acid
  SITE 6: note = (S)-2-amino-3-(2-fluorophenyl)-2-methylpropanoic acid
  SITE 10: note = 3-(4-pyridyl)-L-alanine
  SITE 11: note = 2-aminoisobutyric acid
  SITE 13: note = Alpha-methyl-L-leucine
  SITE 16: note = Ornithine
  SITE 20: note = 2-aminoisobutyric acid
  SITE 24: note = D-Glutamic acid
  SITE 25: note = Alpha-methyl-L-tyrosine
YXEGTXTSDXXIXLDXKAQXEFIEXLIAGSPSSGAPPPS

SEQ ID NO: 84 - protein, 39 aa, synthetic construct
  SITE 2: note = 2-aminoisobutyric acid
  SITE 6: note = (S)-2-amino-3-(2-fluorophenyl)-2-methylpropanoic acid
  SITE 11: note = 2-aminoisobutyric acid
  SITE 13: note = Alpha-methyl-L-leucine
  SITE 16: note = Ornithine
  SITE 20: note = 2-aminoisobutyric acid
  SITE 24: note = D-Glutamic acid
  SITE 25: note = Alpha-methyl-L-tyrosine
YXEGTXTSDYXIXLDXKAQXEFIEXLIAGSPSSGAPPPS

SEQ ID NO: 85 - protein, 39 aa, synthetic construct
  SITE 2: note = 2-aminoisobutyric acid
  SITE 6: note = (S)-2-amino-3-(2-fluorophenyl)-2-methylpropanoic acid
  SITE 10: note = 3-(4-pyridyl)-L-alanine
  SITE 13: note = Alpha-methyl-L-leucine
  SITE 16: note = Ornithine
  SITE 20: note = 2-aminoisobutyric acid
  SITE 24: note = D-Glutamic acid
  SITE 25: note = Alpha-methyl-L-tyrosine
YXEGTXTSDXSIXLDXKAQXEFIEXLIAGGPSSGAPPPS

SEQ ID NO: 86 - protein, 39 aa, synthetic construct
  SITE 2: note = 2-aminoisobutyric acid
  SITE 6: note = (S)-2-amino-3-(2-fluorophenyl)-2-methylpropanoic acid
  SITE 11: note = 2-aminoisobutyric acid
  SITE 13: note = Alpha-methyl-L-leucine
  SITE 16: note = Ornithine
  SITE 20: note = 2-aminoisobutyric acid
  SITE 24: note = D-Glutamic acid
  SITE 25: note = Alpha-methyl-L-tyrosine
YXEGTXTSDYXIXLDXKAQXEFIEXLIAGGPSSGAPPPS

SEQ ID NO: 87 - protein, 39 aa, synthetic construct
  SITE 2: note = 2-aminoisobutyric acid
  SITE 6: note = (S)-2-amino-3-(2-fluorophenyl)-2-methylpropanoic acid
  SITE 10: note = 3-(4-pyridyl)-L-alanine
  SITE 13: note = Alpha-methyl-L-leucine
  SITE 16: note = Ornithine
  SITE 20: note = 2-aminoisobutyric acid
  SITE 24: note = D-Glutamic acid
  SITE 25: note = Alpha-methyl-L-tyrosine
YXEGTXTSDXSIXLDXKAQXEFIEXLVEGSPSSGAPPPS

SEQ ID NO: 88 - protein, 39 aa, synthetic construct; identical to SEQ ID NO: 82
  SITE 2: note = 2-aminoisobutyric acid
  SITE 6: note = (S)-2-amino-3-(2-fluorophenyl)-2-methylpropanoic acid
  SITE 10: note = 3-(4-pyridyl)-L-alanine
  SITE 13: note = Alpha-methyl-L-leucine
  SITE 16: note = Ornithine
  SITE 20: note = 2-aminoisobutyric acid
  SITE 25: note = Alpha-methyl-L-tyrosine

SEQ ID NO: 89 - protein, 39 aa, synthetic construct; identical to SEQ ID NO: 84
  SITE 2: note = 2-aminoisobutyric acid
  SITE 6: note = (S)-2-amino-3-(2-fluorophenyl)-2-methylpropanoic acid
  SITE 11: note = 2-aminoisobutyric acid
  SITE 13: note = Alpha-methyl-L-leucine
  SITE 16: note = Ornithine
  SITE 20: note = 2-aminoisobutyric acid
  SITE 25: note = Alpha-methyl-L-tyrosine

SEQ ID NO: 90 - protein, 39 aa, synthetic construct
  SITE 2: note = 2-aminoisobutyric acid
  SITE 6: note = (S)-2-amino-3-(2-fluorophenyl)-2-methylpropanoic acid
  SITE 10: note = 3-(4-pyridyl)-L-alanine
  SITE 13: note = Alpha-methyl-L-leucine
  SITE 20: note = 2-aminoisobutyric acid
  SITE 24: note = D-Glutamic acid
  SITE 25: note = Alpha-methyl-L-tyrosine
YXEGTXTSDXSIXLDEQAQXEFIEXLIEGSPSSGAPPPS

SEQ ID NO: 91 - protein, 34 aa, synthetic construct
  SITE 2: note = 2-aminoisobutyric acid
  SITE 6: note = (S)-2-amino-3-(2-fluorophenyl)-2-methylpropanoic acid
  SITE 10: note = 3-(4-pyridyl)-L-alanine
  SITE 11: note = 2-aminoisobutyric acid
  SITE 13: note = Alpha-methyl-L-leucine
  SITE 20: note = 2-aminoisobutyric acid
  SITE 25: note = Alpha-methyl-L-tyrosine
YXEGTXTSDXXIXLDEKAQXEFIEXLIEGGPSSG

SEQ ID NO: 92 - protein, 39 aa, synthetic construct
  SITE 2: note = 2-aminoisobutyric acid
  SITE 6: note = (S)-2-amino-3-(2-fluorophenyl)-2-methylpropanoic acid
  SITE 10: note = 3-(4-pyridyl)-L-alanine
  SITE 11: note = 2-aminoisobutyric acid
  SITE 13: note = Alpha-methyl-L-leucine
  SITE 16: note = Ornithine
  SITE 20: note = 2-aminoisobutyric acid
  SITE 25: note = Alpha-methyl-L-tyrosine
  SITE 29: note = 2-aminoisobutyric acid
YXEGTXTSDXXIXLDXKAQXEFIQXLIEXSPSSGAPPPS

SEQ ID NO: 93 - protein, 39 aa, synthetic construct
  SITE 2: note = 2-aminoisobutyric acid
  SITE 6: note = (S)-2-amino-3-(2-fluorophenyl)-2-methylpropanoic acid
  SITE 10: note = 3-(4-pyridyl)-L-alanine
  SITE 13: note = Alpha-methyl-L-leucine
  SITE 16: note = Ornithine
  SITE 20: note = Alpha-methyl-L-3-(4-pyridyl)-L-alanine
  SITE 21: note = Ornithine
  SITE 24: note = D-Glutamic acid
  SITE 25: note = Alpha-methyl-L-tyrosine
YXQGTXTSDXSIXLDXKAQXXFIEXLIEGSPSSGAPPPS

SEQ ID NO: 94 - protein, 39 aa, synthetic construct; identical to SEQ ID NO: 93
  SITE 2: note = 2-aminoisobutyric acid
  SITE 6: note = (S)-2-amino-3-(2-fluorophenyl)-2-methylpropanoic acid
  SITE 10: note = 3-(4-pyridyl)-L-alanine
  SITE 13: note = Alpha-methyl-L-leucine
  SITE 16: note = Ornithine
  SITE 20: note = Alpha-methyl-L-3-(4-pyridyl)-L-alanine
  SITE 21: note = Ornithine
  SITE 25: note = Alpha-methyl-L-tyrosine

SEQ ID NO: 95 - protein, 39 aa, synthetic construct
  SITE 2: note = 2-aminoisobutyric acid
  SITE 6: note = (S)-2-amino-3-(2-fluorophenyl)-2-methylpropanoic acid
  SITE 10: note = 3-(4-pyridyl)-L-alanine
  SITE 11: note = Alpha-methyl-L-serine
  SITE 13: note = Alpha-methyl-L-leucine
  SITE 16: note = Ornithine
  SITE 20: note = Alpha-methyl-L-3-(4-pyridyl)-L-alanine
  SITE 21: note = Ornithine
  SITE 24: note = D-Glutamic acid
  SITE 25: note = Alpha-methyl-L-tyrosine
YXQGTXTSDXXIXLDXKAQXXFIEXLIEGSPSSGAPPPS

SEQ ID NO: 96 - protein, 39 aa, synthetic construct; identical to SEQ ID NO: 95
  SITE 2: note = 2-aminoisobutyric acid
  SITE 6: note = (S)-2-amino-3-(2-fluorophenyl)-2-methylpropanoic acid
  SITE 10: note = 3-(4-pyridyl)-L-alanine
  SITE 11: note = Alpha-methyl-L-serine
  SITE 13: note = Alpha-methyl-L-leucine
  SITE 16: note = Ornithine
  SITE 20: note = Alpha-methyl-L-3-(4-pyridyl)-L-alanine
  SITE 21: note = Ornithine
  SITE 25: note = Alpha-methyl-L-tyrosine

SEQ ID NO: 97 - protein, 39 aa, synthetic construct
  SITE 2: note = 2-aminoisobutyric acid
  SITE 6: note = (S)-2-amino-3-(2-fluorophenyl)-2-methylpropanoic acid
  SITE 11: note = Alpha-methyl-L-serine
  SITE 13: note = Alpha-methyl-L-leucine
  SITE 16: note = Ornithine
  SITE 20: note = Alpha-methyl-L-3-(4-pyridyl)-L-alanine
  SITE 21: note = Ornithine
  SITE 24: note = D-Glutamic acid
  SITE 25: note = Alpha-methyl-L-tyrosine
YXQGTXTSDYXIXLDXKAQXXFIEXLIEGSPSSGAPPPS

SEQ ID NO: 98 - protein, 39 aa, synthetic construct; identical to SEQ ID NO: 97
  SITE 2: note = 2-aminoisobutyric acid
  SITE 6: note = (S)-2-amino-3-(2-fluorophenyl)-2-methylpropanoic acid
  SITE 11: note = Alpha-methyl-L-serine
  SITE 13: note = Alpha-methyl-L-leucine
  SITE 16: note = Ornithine
  SITE 20: note = Alpha-methyl-L-3-(4-pyridyl)-L-alanine
  SITE 21: note = Ornithine
  SITE 25: note = Alpha-methyl-L-tyrosine

SEQ ID NO: 99 - protein, 31 aa, synthetic construct
  SITE 2: note = 2-aminoisobutyric acid
  SITE 6: note = (S)-2-amino-3-(2-fluorophenyl)-2-methylpropanoic acid
  SITE 10: note = 3-(4-pyridyl)-L-alanine
  SITE 11: note = Alpha-methyl-L-serine
  SITE 13: note = Alpha-methyl-L-leucine
  SITE 16: note = Ornithine
  SITE 20: note = Alpha-methyl-L-3-(4-pyridyl)-L-alanine
  SITE 21: note = Ornithine
  SITE 25: note = Alpha-methyl-L-tyrosine
YXQGTXTSDXXIXLDXKAQXXFIEXLIEGGG

SEQ ID NO: 100 - protein, 31 aa, synthetic construct
  SITE 2: note = 2-aminoisobutyric acid
  SITE 6: note = (S)-2-amino-3-(2-fluorophenyl)-2-methylpropanoic acid
  SITE 11: note = Alpha-methyl-L-serine
  SITE 13: note = Alpha-methyl-L-leucine
  SITE 16: note = Ornithine
  SITE 20: note = Alpha-methyl-L-3-(4-pyridyl)-L-alanine
  SITE 21: note = Ornithine
  SITE 24: note = D-Glutamic acid
  SITE 25: note = Alpha-methyl-L-tyrosine
YXQGTXTSDYXIXLDXKAQXXFIEXLIEGGG

SEQ ID NO: 101 - protein, 39 aa, synthetic construct
  SITE 2: note = 2-aminoisobutyric acid
  SITE 6: note = (S)-2-amino-3-(2-fluorophenyl)-2-methylpropanoic acid
  SITE 10: note = 3-(4-pyridyl)-L-alanine
  SITE 11: note = Alpha-methyl-L-serine
  SITE 13: note = Alpha-methyl-L-leucine
  SITE 16: note = Ornithine
  SITE 20: note = Alpha-methyl-L-3-(4-pyridyl)-L-alanine
  SITE 21: note = Ornithine
  SITE 25: note = Alpha-methyl-L-tyrosine
YXQGTXTSDXXIXLDXKAQXXFIEXLIEGGPSSGAPPPS

SEQ ID NO: 102 - protein, 39 aa, synthetic construct
  SITE 2: note = 2-aminoisobutyric acid
  SITE 6: note = (S)-2-amino-3-(2-fluorophenyl)-2-methylpropanoic acid
  SITE 11: note = Alpha-methyl-L-serine
  SITE 13: note = Alpha-methyl-L-leucine
  SITE 16: note = Ornithine
  SITE 20: note = Alpha-methyl-L-3-(4-pyridyl)-L-alanine
  SITE 21: note = Ornithine
  SITE 24: note = D-Glutamic acid
  SITE 25: note = Alpha-methyl-L-tyrosine
YXQGTXTSDYXIXLDXKAQXXFIEXLIEGGPSSGAPPPS

SEQ ID NO: 103 - protein, 41 aa, synthetic construct
  SITE 2: note = 2-aminoisobutyric acid
  SITE 6: note = (S)-2-amino-3-(2-fluorophenyl)-2-methylpropanoic acid
  SITE 10: note = 3-(4-pyridyl)-L-alanine
  SITE 11: note = Alpha-methyl-L-serine
  SITE 13: note = Alpha-methyl-L-leucine
  SITE 16: note = Ornithine
  SITE 20: note = Alpha-methyl-L-3-(4-pyridyl)-L-alanine
  SITE 21: note = Ornithine
  SITE 25: note = Alpha-methyl-L-tyrosine
YXQGTXTSDXXIXLDXKAQXXFIKXLIEGGPSSGAPPPSGG

SEQ ID NO: 104 - protein, 41 aa, synthetic construct
  SITE 2: note = 2-aminoisobutyric acid
  SITE 6: note = (S)-2-amino-3-(2-fluorophenyl)-2-methylpropanoic acid
  SITE 11: note = Alpha-methyl-L-serine
  SITE 13: note = Alpha-methyl-L-leucine
  SITE 16: note = Ornithine
  SITE 20: note = Alpha-methyl-L-3-(4-pyridyl)-L-alanine
  SITE 21: note = Ornithine
  SITE 25: note = Alpha-methyl-L-tyrosine
YXQGTXTSDYXIXLDXKAQXXFIKXLIEGGPSSGAPPPSGG

SEQ ID NO: 105 - protein, 41 aa, synthetic construct; identical to SEQ ID NO: 104
  SITE 2: note = 2-aminoisobutyric acid
  SITE 6: note = (S)-2-amino-3-(2-fluorophenyl)-2-methylpropanoic acid
  SITE 11: note = Alpha-methyl-L-serine
  SITE 13: note = Alpha-methyl-L-leucine
  SITE 16: note = Ornithine
  SITE 20: note = Alpha-methyl-L-3-(4-pyridyl)-L-alanine
  SITE 21: note = Ornithine
  SITE 25: note = Alpha-methyl-L-tyrosine

SEQ ID NO: 106 - protein, 34 aa, synthetic construct
  SITE 2: note = 2-aminoisobutyric acid
  SITE 6: note = (S)-2-amino-3-(2-fluorophenyl)-2-methylpropanoic acid
  SITE 10: note = 3-(4-pyridyl)-L-alanine
  SITE 11: note = Alpha-methyl-L-serine
  SITE 13: note = Alpha-methyl-L-leucine
  SITE 16: note = Ornithine
  SITE 20: note = Alpha-methyl-L-3-(4-pyridyl)-L-alanine
  SITE 21: note = Ornithine
  SITE 25: note = Alpha-methyl-L-tyrosine
YXQGTXTSDXXIXLDXKAQXXFIEXLIEGGPSSG

SEQ ID NO: 107 - protein, 34 aa, synthetic construct
  SITE 2: note = 2-aminoisobutyric acid
  SITE 6: note = (S)-2-amino-3-(2-fluorophenyl)-2-methylpropanoic acid
  SITE 11: note = Alpha-methyl-L-serine
  SITE 13: note = Alpha-methyl-L-leucine
  SITE 16: note = Ornithine
  SITE 20: note = Alpha-methyl-L-3-(4-pyridyl)-L-alanine
  SITE 21: note = Ornithine
  SITE 24: note = D-Glutamic acid
  SITE 25: note = Alpha-methyl-L-tyrosine
YXQGTXTSDYXIXLDXKAQXXFIEXLIEGGPSSG

SEQ ID NO: 108 - protein, 34 aa, synthetic construct
  SITE 2: note = 2-aminoisobutyric acid
  SITE 6: note = (S)-2-amino-3-(2-fluorophenyl)-2-methylpropanoic acid
  SITE 10: note = 3-(4-pyridyl)-L-alanine
  SITE 11: note = Alpha-methyl-L-serine
  SITE 13: note = Alpha-methyl-L-leucine
  SITE 16: note = Ornithine
  SITE 20: note = Alpha-methyl-L-3-(4-pyridyl)-L-alanine
  SITE 21: note = Ornithine
  SITE 24: note = D-Glutamic acid
  SITE 25: note = Alpha-methyl-L-tyrosine
YXQGTXTSDXXIXLDXKAQXXFIEXLIEGSPSSG

SEQ ID NO: 109 - protein, 31 aa, synthetic construct; identical to SEQ ID NO: 99
  SITE 2: note = 2-aminoisobutyric acid
  SITE 6: note = (S)-2-amino-3-(2-fluorophenyl)-2-methylpropanoic acid
  SITE 10: note = 3-(4-pyridyl)-L-alanine
  SITE 11: note = Alpha-methyl-L-serine
  SITE 13: note = Alpha-methyl-L-leucine
  SITE 16: note = Ornithine
  SITE 20: note = Alpha-methyl-L-3-(4-pyridyl)-L-alanine
  SITE 21: note = Ornithine
  SITE 24: note = D-Glutamic acid
  SITE 25: note = Alpha-methyl-L-tyrosine

SEQ ID NO: 110 - protein, 39 aa, synthetic construct
  SITE 2: note = 2-aminoisobutyric acid
  SITE 6: note = (S)-2-amino-3-(2-fluorophenyl)-2-methylpropanoic acid
  SITE 10: note = 3-(4-pyridyl)-L-alanine
  SITE 11: note = Alpha-methyl-L-serine
  SITE 13: note = Alpha-methyl-L-leucine
  SITE 16: note = Ornithine
  SITE 20: note = Alpha-methyl-L-3-(4-pyridyl)-L-alanine
  SITE 21: note = Ornithine
  SITE 25: note = Alpha-methyl-L-tyrosine
YXQGTXTSDXXIXLDXKAQXXFIQXLIEGSPSSGAPPPS

SEQ ID NO: 111 - protein, 39 aa, synthetic construct
  SITE 2: note = 2-aminoisobutyric acid
  SITE 6: note = (S)-2-amino-3-(2-fluorophenyl)-2-methylpropanoic acid
  SITE 11: note = Alpha-methyl-L-serine
  SITE 13: note = Alpha-methyl-L-leucine
  SITE 16: note = Ornithine
  SITE 20: note = Alpha-methyl-L-3-(4-pyridyl)-L-alanine
  SITE 21: note = Ornithine
  SITE 25: note = Alpha-methyl-L-tyrosine
YXQGTXTSDYXIXLDXKAQXXFIQXLIEGSPSSGAPPPS

SEQ ID NO: 112 - protein, 39 aa, synthetic construct
  SITE 2: note = 2-aminoisobutyric acid
  SITE 6: note = (S)-2-amino-3-(2-fluorophenyl)-2-methylpropanoic acid
  SITE 11: note = Alpha-methyl-L-serine
  SITE 13: note = Alpha-methyl-L-leucine
  SITE 16: note = Ornithine
  SITE 20: note = Alpha-methyl-L-3-(4-pyridyl)-L-alanine
  SITE 21: note = Ornithine
  SITE 24: note = D-Glutamic acid
  SITE 25: note = Alpha-methyl-L-tyrosine
  SITE 29: note = 2-aminoisobutyric acid
YXQGTXTSDYXIXLDXKAQXXFIEXLIEXSPSSGAPPPS

SEQ ID NO: 113 - protein, 39 aa, synthetic construct
  SITE 2: note = 2-aminoisobutyric acid
  SITE 6: note = (S)-2-amino-3-(2-fluorophenyl)-2-methylpropanoic acid
  SITE 11: note = Alpha-methyl-L-serine
  SITE 13: note = Alpha-methyl-L-leucine
  SITE 16: note = Ornithine
  SITE 20: note = Alpha-methyl-L-3-(4-pyridyl)-L-alanine
  SITE 24: note = D-Glutamic acid
  SITE 25: note = Alpha-methyl-L-tyrosine
YXQGTXTSDYXIXLDXKAQXEFIEXLIEGSPSSGAPPPS

SEQ ID NO: 114 - protein, 39 aa, synthetic construct
  SITE 2: note = 2-aminoisobutyric acid
  SITE 6: note = (S)-2-amino-3-(2-fluorophenyl)-2-methylpropanoic acid
  SITE 11: note = Alpha-methyl-L-serine
  SITE 13: note = Alpha-methyl-L-leucine
  SITE 16: note = Ornithine
  SITE 20: note = Alpha-methyl-L-3-(4-pyridyl)-L-alanine
  SITE 25: note = Alpha-methyl-L-tyrosine
YXQGTXTSDYXIXLDXKAQXEFIQXLIEGSPSSGAPPPS

SEQ ID NO: 115 - protein, 39 aa, synthetic construct; identical to SEQ ID NO: 114
  SITE 2: note = 2-aminoisobutyric acid
  SITE 6: note = (S)-2-amino-3-(2-fluorophenyl)-2-methylpropanoic acid
  SITE 11: note = Alpha-methyl-L-serine
  SITE 13: note = Alpha-methyl-L-leucine
  SITE 16: note = Ornithine
  SITE 20: note = 2-aminoisobutyric acid
  SITE 25: note = Alpha-methyl-L-tyrosine

SEQ ID NO: 116 - protein, 39 aa, synthetic construct
  SITE 2: note = 2-aminoisobutyric acid
  SITE 6: note = (S)-2-amino-3-(2-fluorophenyl)-2-methylpropanoic acid
  SITE 11: note = Alpha-methyl-L-serine
  SITE 13: note = Alpha-methyl-L-leucine
  SITE 16: note = Ornithine
  SITE 20: note = Alpha-methyl-L-3-(4-pyridyl)-L-alanine
  SITE 25: note = Alpha-methyl-L-tyrosine
YXQGTXTSDYXIXLDXKAQXEFIQXLLEGSPSSGAPPPS

SEQ ID NO: 117 - protein, 39 aa, synthetic construct
  SITE 2: note = 2-aminoisobutyric acid
  SITE 6: note = (S)-2-amino-3-(2-fluorophenyl)-2-methylpropanoic acid
  SITE 10: note = 3-(4-pyridyl)-L-alanine
  SITE 13: note = Alpha-methyl-L-leucine
  SITE 16: note = Ornithine
  SITE 20: note = Alpha-methyl-L-3-(4-pyridyl)-L-alanine
  SITE 21: note = Ornithine
  SITE 25: note = Alpha-methyl-L-tyrosine
YXQGTXTSDXSIXLDXKAQXXFIQXLIEGSPSSGAPPPS

SEQ ID NO: 118 - protein, 31 aa, synthetic construct
  SITE 2: note = 2-aminoisobutyric acid
  SITE 6: note = (S)-2-amino-3-(2-fluorophenyl)-2-methylpropanoic acid
  SITE 11: note = Alpha-methyl-L-serine
  SITE 13: note = Alpha-methyl-L-leucine
  SITE 16: note = Ornithine
  SITE 20: note = Alpha-methyl-L-3-(4-pyridyl)-L-alanine
  SITE 21: note = Ornithine
  SITE 24: note = D-Glutamic acid
  SITE 25: note = Alpha-methyl-L-tyrosine
  SITE 29: note = 2-aminoisobutyric acid
YXQGTXTSDYXIXLDXKAQXXFIEXLIEXGG

SEQ ID NO: 119 - protein, 39 aa, synthetic construct
  SITE 2: note = 2-aminoisobutyric acid
  SITE 4: note = D-Alanine
  SITE 6: note = (S)-2-amino-3-(2-fluorophenyl)-2-methylpropanoic acid
  SITE 11: note = Alpha-methyl-L-serine
  SITE 13: note = Alpha-methyl-L-leucine
  SITE 16: note = Ornithine
  SITE 20: note = Alpha-methyl-L-3-(4-pyridyl)-L-alanine
  SITE 25: note = Alpha-methyl-L-tyrosine
YXQATXTSDYXIXLDXKAQXEFIQXLIEGSPSSGAPPPS

SEQ ID NO: 120 - protein, 39 aa, synthetic construct; identical to SEQ ID NO: 114
  SITE 2: note = Alpha-methyl-L-serine
  SITE 6: note = (S)-2-amino-3-(2-fluorophenyl)-2-methylpropanoic acid
  SITE 11: note = Alpha-methyl-L-serine
  SITE 13: note = Alpha-methyl-L-leucine
  SITE 16: note = Ornithine
  SITE 20: note = Alpha-methyl-L-3-(4-pyridyl)-L-alanine
  SITE 25: note = Alpha-methyl-L-tyrosine

SEQ ID NO: 121 - protein, 39 aa, synthetic construct; identical to SEQ ID NO: 114
  SITE 2: note = L-isovaline
  SITE 6: note = (S)-2-amino-3-(2-fluorophenyl)-2-methylpropanoic acid
  SITE 11: note = Alpha-methyl-L-serine
  SITE 13: note = Alpha-methyl-L-leucine
  SITE 16: note = Ornithine
  SITE 20: note = Alpha-methyl-L-3-(4-pyridyl)-L-alanine
  SITE 25: note = Alpha-methyl-L-tyrosine

SEQ ID NO: 122 - protein, 39 aa, synthetic construct
  SITE 2: note = 2-aminoisobutyric acid
  SITE 6: note = (S)-2-amino-3-(2-fluorophenyl)-2-methylpropanoic acid
  SITE 11: note = Alpha-methyl-L-serine
  SITE 13: note = Alpha-methyl-L-leucine
  SITE 16: note = Ornithine
  SITE 20: note = Alpha-methyl-L-3-(4-pyridyl)-L-alanine
  SITE 25: note = Alpha-methyl-L-tyrosine
YXHGTXTSDYXIXLDXKAQXEFIQXLIEGSPSSGAPPPS

SEQ ID NO: 123 - protein, 39 aa, synthetic construct
  SITE 2: note = 2-aminoisobutyric acid
  SITE 6: note = (S)-2-amino-3-(2-fluorophenyl)-2-methylpropanoic acid
  SITE 11: note = Alpha-methyl-L-serine
  SITE 13: note = Alpha-methyl-L-leucine
  SITE 16: note = Ornithine
  SITE 20: note = Alpha-methyl-L-3-(4-pyridyl)-L-alanine
  SITE 25: note = Alpha-methyl-L-tyrosine
HXHGTXTSDYXIXLDXKAQXEFIQXLIEGSPSSGAPPPS

SEQ ID NO: 124 - protein, 39 aa, synthetic construct; identical to SEQ ID NO: 123
  SITE 2: note = 2-aminoisobutyric acid
  SITE 6: note = (S)-2-amino-3-(2-fluorophenyl)-2-methylpropanoic acid
  SITE 11: note = Alpha-methyl-L-serine
  SITE 13: note = Alpha-methyl-L-leucine
  SITE 16: note = Ornithine
  SITE 20: note = 2-aminoisobutyric acid
  SITE 25: note = Alpha-methyl-L-tyrosine

SEQ ID NO: 125 - protein, 39 aa, synthetic construct
  SITE 2: note = 2-aminoisobutyric acid
  SITE 6: note = (S)-2-amino-3-(2-fluorophenyl)-2-methylpropanoic acid
  SITE 10: note = 3-(4-pyridyl)-L-alanine
  SITE 11: note = Alpha-methyl-L-serine
  SITE 13: note = Alpha-methyl-L-leucine
  SITE 16: note = Ornithine
  SITE 20: note = Alpha-methyl-L-3-(4-pyridyl)-L-alanine
  SITE 25: note = Alpha-methyl-L-tyrosine
HXHGTXTSDXXIXLDXKAQXEFIQXLIEGSPSSGAPPPS

SEQ ID NO: 126 - protein, 39 aa, synthetic construct
  SITE 2: note = 2-aminoisobutyric acid
  SITE 6: note = (S)-2-amino-3-(2-fluorophenyl)-2-methylpropanoic acid
  SITE 10: note = 3-(4-pyridyl)-L-alanine
  SITE 13: note = Alpha-methyl-L-leucine
  SITE 16: note = Ornithine
  SITE 20: note = Alpha-methyl-L-3-(4-pyridyl)-L-alanine
  SITE 25: note = Alpha-methyl-L-tyrosine
HXHGTXTSDXSIXLDXKAQXEFIQXLIEGSPSSGAPPPS

SEQ ID NO: 127 - protein, 39 aa, synthetic construct
  SITE 2: note = 2-aminoisobutyric acid
  SITE 6: note = (S)-2-amino-3-(2-fluorophenyl)-2-methylpropanoic acid
  SITE 11: note = Alpha-methyl-L-serine
  SITE 13: note = Alpha-methyl-L-leucine
  SITE 16: note = Ornithine
  SITE 20: note = Alpha-methyl-L-3-(4-pyridyl)-L-alanine
  SITE 25: note = Alpha-methyl-L-tyrosine
  SITE 29: note = 2-aminoisobutyric acid
YXQGTXTSDYXIXLDXKAQXEFIQXLIEXSPSSGAPPPS

SEQ ID NO: 128 - protein, 39 aa, synthetic construct; identical to SEQ ID NO: 113
  SITE 2: note = 2-aminoisobutyric acid
  SITE 6: note = (S)-2-amino-3-(2-fluorophenyl)-2-methylpropanoic acid
  SITE 11: note = Alpha-methyl-L-serine
  SITE 13: note = Alpha-methyl-L-leucine
  SITE 16: note = Ornithine
  SITE 20: note = Alpha-methyl-L-3-(4-pyridyl)-L-alanine
  SITE 25: note = Alpha-methyl-L-tyrosine

SEQ ID NO: 129 - protein, 39 aa, synthetic construct
  SITE 2: note = 2-aminoisobutyric acid
  SITE 6: note = (S)-2-amino-3-(2-fluorophenyl)-2-methylpropanoic acid
  SITE 10: note = 3-(4-pyridyl)-L-alanine
  SITE 11: note = Alpha-methyl-L-serine
  SITE 13: note = Alpha-methyl-L-leucine
  SITE 16: note = Ornithine
  SITE 20: note = Alpha-methyl-L-3-(4-pyridyl)-L-alanine
  SITE 25: note = Alpha-methyl-L-tyrosine
YXQGTXTSDXXIXLDXKAQXEFIQXLIEGSPSSGAPPPS

SEQ ID NO: 130 - protein, 39 aa, synthetic construct
  SITE 2: note = 2-aminoisobutyric acid
  SITE 6: note = (S)-2-amino-3-(2-fluorophenyl)-2-methylpropanoic acid
  SITE 10: note = 3-(4-pyridyl)-L-alanine
  SITE 11: note = Alpha-methyl-L-serine
  SITE 13: note = Alpha-methyl-L-leucine
  SITE 16: note = Ornithine
  SITE 20: note = Alpha-methyl-L-3-(4-pyridyl)-L-alanine
  SITE 25: note = Alpha-methyl-L-tyrosine
YXQGTXTSDXXIXLDXKAQXEFIEXLIEGSPSSGAPPPS

SEQ ID NO: 131 - protein, 39 aa, synthetic construct
  SITE 2: note = 2-aminoisobutyric acid
  SITE 6: note = (S)-2-amino-3-(2-fluorophenyl)-2-methylpropanoic acid
  SITE 11: note = Alpha-methyl-L-serine
  SITE 13: note = Alpha-methyl-L-leucine
  SITE 16: note = Ornithine
  SITE 20: note = Alpha-methyl-L-3-(4-pyridyl)-L-alanine
  SITE 25: note = Alpha-methyl-L-tyrosine
  SITE 29: note = 2-aminoisobutyric acid
YXQGTXTSDYXIXLDXKAQXEFIEXLIEXSPSSGAPPPS

SEQ ID NO: 132 - protein, 39 aa, synthetic construct
  SITE 2: note = 2-aminoisobutyric acid
  SITE 6: note = (S)-2-amino-3-(2-fluorophenyl)-2-methylpropanoic acid
  SITE 10: note = 3-(4-pyridyl)-L-alanine
  SITE 11: note = Alpha-methyl-L-serine
  SITE 13: note = Alpha-methyl-L-leucine
  SITE 16: note = Ornithine
  SITE 20: note = Alpha-methyl-L-3-(4-pyridyl)-L-alanine
  SITE 25: note = Alpha-methyl-L-tyrosine
  SITE 29: note = 2-aminoisobutyric acid
YXQGTXTSDXXIXLDXKAQXEFIQXLIEXSPSSGAPPPS

SEQ ID NO: 133 - protein, 39 aa, synthetic construct
  SITE 2: note = 2-aminoisobutyric acid
  SITE 6: note = (S)-2-amino-3-(2-fluorophenyl)-2-methylpropanoic acid
  SITE 10: note = 3-(4-pyridyl)-L-alanine
  SITE 11: note = Alpha-methyl-L-serine
  SITE 13: note = Alpha-methyl-L-leucine
  SITE 16: note = Ornithine
  SITE 20: note = Alpha-methyl-L-3-(4-pyridyl)-L-alanine
  SITE 25: note = Alpha-methyl-L-tyrosine
  SITE 29: note = 2-aminoisobutyric acid
YXQGTXTSDXXIXLDXKAQXEFIEXLIEXSPSSGAPPPS

SEQ ID NO: 134 - protein, 39 aa, synthetic construct
  SITE 2: note = 2-aminoisobutyric acid
  SITE 6: note = (S)-2-amino-3-(2-fluorophenyl)-2-methylpropanoic acid
  SITE 11: note = Alpha-methyl-L-serine
  SITE 13: note = Alpha-methyl-L-leucine
  SITE 20: note = Alpha-methyl-L-3-(4-pyridyl)-L-alanine
  SITE 25: note = Alpha-methyl-L-tyrosine
YXQGTXTSDYXIXLDEKAQXEFIQXLLEGSPSSGAPPPS

SEQ ID NO: 135 - protein, 39 aa, synthetic construct
  SITE 2: note = 2-aminoisobutyric acid
  SITE 6: note = (S)-2-amino-3-(2-fluorophenyl)-2-methylpropanoic acid
  SITE 11: note = Alpha-methyl-L-serine
  SITE 13: note = Alpha-methyl-L-leucine
  SITE 20: note = Alpha-methyl-L-3-(4-pyridyl)-L-alanine
  SITE 25: note = Alpha-methyl-L-tyrosine
  SITE 29: note = 2-aminoisobutyric acid
YXQGTXTSDYXIXLDEKAQXEFIQXLLEXSPSSGAPPPS

SEQ ID NO: 136 - protein, 39 aa, synthetic construct
  SITE 2: note = 2-aminoisobutyric acid
  SITE 6: note = (S)-2-amino-3-(2-fluorophenyl)-2-methylpropanoic acid
  SITE 11: note = Alpha-methyl-L-serine
  SITE 13: note = Alpha-methyl-L-leucine
  SITE 16: note = Ornithine
  SITE 20: note = Alpha-methyl-L-3-(4-pyridyl)-L-alanine
  SITE 25: note = Alpha-methyl-L-tyrosine
HXQGTXTSDYXIXLDXKAQXEFIQXLIEGSPSSGAPPPS

SEQ ID NO: 137 - protein, 39 aa, synthetic construct
  SITE 2: note = 2-aminoisobutyric acid
  SITE 6: note = (S)-2-amino-3-(2-fluorophenyl)-2-methylpropanoic acid
  SITE 11: note = Alpha-methyl-L-serine
  SITE 13: note = Alpha-methyl-L-leucine
  SITE 16: note = Ornithine
  SITE 20: note = Alpha-methyl-L-3-(4-pyridyl)-L-alanine
  SITE 25: note = Alpha-methyl-L-tyrosine
YXQGTXTSDYXIXLDXKAQXEFIQXLVEGSPSSGAPPPS

SEQ ID NO: 138 - protein, 31 aa, synthetic construct
  SITE 2: note = 2-aminoisobutyric acid
  SITE 6: note = (S)-2-amino-3-(2-fluorophenyl)-2-methylpropanoic acid
  SITE 11: note = Alpha-methyl-L-serine
  SITE 13: note = Alpha-methyl-L-leucine
  SITE 16: note = Ornithine
  SITE 20: note = Alpha-methyl-L-3-(4-pyridyl)-L-alanine
  SITE 25: note = Alpha-methyl-L-tyrosine
YXQGTXTSDYXIXLDXKAQXEFIQXLIEGGG

SEQ ID NO: 139 - protein, 39 aa, synthetic construct
  SITE 2: note = 2-aminoisobutyric acid
  SITE 6: note = (S)-2-amino-3-(2-fluorophenyl)-2-methylpropanoic acid
  SITE 11: note = Alpha-methyl-L-serine
  SITE 13: note = Alpha-methyl-L-leucine
  SITE 16: note = Ornithine
  SITE 20: note = 2-aminoisobutyric acid
  SITE 25: note = Alpha-methyl-L-tyrosine
HXHGTXTSDYXIXLDXKAQXEFIQXLLEGSPSSGAPPPS

SEQ ID NO: 140 - protein, 39 aa, synthetic construct
  SITE 2: note = 2-aminoisobutyric acid
  SITE 6: note = (S)-2-amino-3-(2-fluorophenyl)-2-methylpropanoic acid
  SITE 10: note = 3-(4-pyridyl)-L-alanine
  SITE 13: note = Alpha-methyl-L-leucine
  SITE 16: note = Ornithine
  SITE 20: note = Alpha-methyl-L-3-(4-pyridyl)-L-alanine
  SITE 25: note = Alpha-methyl-L-tyrosine
HXHGTXTSDXSIXLDXKAQXEFIQXLLEGSPSSGAPPPS

SEQ ID NO: 141 - protein, 39 aa, synthetic construct
  SITE 2: note = 2-aminoisobutyric acid
  SITE 6: note = (S)-2-amino-3-(2-fluorophenyl)-2-methylpropanoic acid
  SITE 11: note = Alpha-methyl-L-serine
  SITE 13: note = Alpha-methyl-L-leucine
  SITE 16: note = Ornithine
  SITE 20: note = Alpha-methyl-L-3-(4-pyridyl)-L-alanine
  SITE 25: note = Alpha-methyl-L-tyrosine
YXQGTXTSDYXIXLDXKAQXDFIQXLIEGSPSSGAPPPS

SEQ ID NO: 142 - protein, 39 aa, synthetic construct
  SITE 2: note = 2-aminoisobutyric acid
  SITE 6: note = (S)-2-amino-3-(2-fluorophenyl)-2-methylpropanoic acid
  SITE 11: note = Alpha-methyl-L-serine
  SITE 13: note = Alpha-methyl-L-leucine
  SITE 16: note = Ornithine
  SITE 20: note = Alpha-methyl-L-3-(4-pyridyl)-L-alanine
  SITE 21: note = Ornithine
  SITE 25: note = Alpha-methyl-L-tyrosine
  SITE 29: note = 2-aminoisobutyric acid
YXQGTXTSDYXIXLDXKAQXXFIEXLIAXSPSSGAPPPS

SEQ ID NO: 143 - protein, 39 aa, synthetic construct
  SITE 2: note = 2-aminoisobutyric acid
  SITE 6: note = (S)-2-amino-3-(2-fluorophenyl)-2-methylpropanoic acid
  SITE 11: note = Alpha-methyl-L-serine
  SITE 13: note = Alpha-methyl-L-leucine
  SITE 16: note = Ornithine
  SITE 20: note = Alpha-methyl-L-3-(4-pyridyl)-L-alanine
  SITE 25: note = Alpha-methyl-L-tyrosine
  SITE 29: note = 2-aminoisobutyric acid
YXQGTXTSDYXIXLDXKAQXEFIQXLLEXSPSSGAPPPS

SEQ ID NO: 144 - protein, 39 aa, synthetic construct
  SITE 2: note = 2-aminoisobutyric acid
  SITE 6: note = (S)-2-amino-3-(2-fluorophenyl)-2-methylpropanoic acid
  SITE 11: note = Alpha-methyl-L-serine
  SITE 13: note = Alpha-methyl-L-leucine
  SITE 16: note = Ornithine
  SITE 20: note = Alpha-methyl-L-3-(4-pyridyl)-L-alanine
  SITE 25: note = Alpha-methyl-L-tyrosine
HXQGTXTSDYXIXLDXKAQXEFIEXLIEGSPSSGAPPPS

SEQ ID NO: 145 - protein, 39 aa, synthetic construct
  SITE 2: note = 2-aminoisobutyric acid
  SITE 6: note = (S)-2-amino-3-(2-fluorophenyl)-2-methylpropanoic acid
  SITE 11: note = Alpha-methyl-L-serine
  SITE 13: note = Alpha-methyl-L-leucine
  SITE 16: note = Ornithine
  SITE 20: note = Alpha-methyl-L-3-(4-pyridyl)-L-alanine
  SITE 25: note = Alpha-methyl-L-tyrosine
  SITE 29: note = 2-aminoisobutyric acid
HXQGTXTSDYXIXLDXKAQXEFIEXLIEXSPSSGAPPPS

SEQ ID NO: 146 - protein, 39 aa, synthetic construct
  SITE 2: note = 2-aminoisobutyric acid
  SITE 6: note = (S)-2-amino-3-(2-fluorophenyl)-2-methylpropanoic acid
  SITE 11: note = Alpha-methyl-L-serine
  SITE 13: note = Alpha-methyl-L-leucine
  SITE 16: note = Ornithine
  SITE 20: note = Alpha-methyl-L-3-(4-pyridyl)-L-alanine
  SITE 25: note = Alpha-methyl-L-tyrosine
HXQGTXTSDYXIXLDXKAQXEFIEXLLEGSPSSGAPPPS

SEQ ID NO: 147 - protein, 39 aa, synthetic construct
  SITE 2: note = 2-aminoisobutyric acid
  SITE 6: note = (S)-2-amino-3-(2-fluorophenyl)-2-methylpropanoic acid
  SITE 11: note = Alpha-methyl-L-serine
  SITE 13: note = Alpha-methyl-L-leucine
  SITE 16: note = Ornithine
  SITE 20: note = Alpha-methyl-L-3-(4-pyridyl)-L-alanine
  SITE 25: note = Alpha-methyl-L-tyrosine
  SITE 29: note = 2-aminoisobutyric acid
HXQGTXTSDYXIXLDXKAQXEFIEXLLEXSPSSGAPPPS

SEQ ID NO: 148 - protein, 39 aa, synthetic construct
  SITE 2: note = 2-aminoisobutyric acid
  SITE 6: note = (S)-2-amino-3-(2-fluorophenyl)-2-methylpropanoic acid
  SITE 11: note = Alpha-methyl-L-serine
  SITE 13: note = Alpha-methyl-L-leucine
  SITE 16: note = Ornithine
  SITE 20: note = Alpha-methyl-L-3-(4-pyridyl)-L-alanine
  SITE 25: note = Alpha-methyl-L-tyrosine
  SITE 29: note = 2-aminoisobutyric acid
HXQGTXTSDYXIXLDXKAQXEFIQXLIEXSPSSGAPPPS

SEQ ID NO: 149 - protein, 39 aa, synthetic construct
  SITE 2: note = 2-aminoisobutyric acid
  SITE 6: note = (S)-2-amino-3-(2-fluorophenyl)-2-methylpropanoic acid
  SITE 11: note = Alpha-methyl-L-serine
  SITE 13: note = Alpha-methyl-L-leucine
  SITE 16: note = Ornithine
  SITE 20: note = Alpha-methyl-L-3-(4-pyridyl)-L-alanine
  SITE 25: note = Alpha-methyl-L-tyrosine
  SITE 29: note = 2-aminoisobutyric acid
HXQGTXTSDYXIXLDXKAQXEFIQXLLEXSPSSGAPPPS

SEQ ID NO: 150 - protein, 39 aa, synthetic construct; identical to SEQ ID NO: 113
  SITE 2: note = Alpha-methyl-L-serine
  SITE 6: note = (S)-2-amino-3-(2-fluorophenyl)-2-methylpropanoic acid
  SITE 11: note = Alpha-methyl-L-serine
  SITE 13: note = Alpha-methyl-L-leucine
  SITE 16: note = Ornithine
  SITE 20: note = Alpha-methyl-L-3-(4-pyridyl)-L-alanine
  SITE 25: note = Alpha-methyl-L-tyrosine

SEQ ID NO: 151 - protein, 39 aa, synthetic construct; identical to SEQ ID NO: 113
  SITE 2: note = L-isovaline
  SITE 6: note = (S)-2-amino-3-(2-fluorophenyl)-2-methylpropanoic acid
  SITE 11: note = Alpha-methyl-L-serine
  SITE 13: note = Alpha-methyl-L-leucine
  SITE 16: note = Ornithine
  SITE 20: note = Alpha-methyl-L-3-(4-pyridyl)-L-alanine
  SITE 25: note = Alpha-methyl-L-tyrosine

SEQ ID NO: 152 - protein, 39 aa, synthetic construct; identical to SEQ ID NO: 113
  SITE 2: note = 1-Aminocyclobutane-1-carboxylic acid
  SITE 6: note = (S)-2-amino-3-(2-fluorophenyl)-2-methylpropanoic acid
  SITE 11: note = Alpha-methyl-L-serine
  SITE 13: note = Alpha-methyl-L-leucine
  SITE 16: note = Ornithine
  SITE 20: note = Alpha-methyl-L-3-(4-pyridyl)-L-alanine
  SITE 25: note = Alpha-methyl-L-tyrosine

SEQ ID NO: 153 - protein, 39 aa, synthetic construct
  SITE 2: note = 2-aminoisobutyric acid
  SITE 6: note = (S)-2-amino-3-(2-fluorophenyl)-2-methylpropanoic acid
  SITE 11: note = Alpha-methyl-L-serine
  SITE 13: note = Alpha-methyl-L-leucine
  SITE 16: note = Ornithine
  SITE 20: note = Alpha-methyl-L-3-(4-pyridyl)-L-alanine
  SITE 21: note = Ornithine
  SITE 25: note = Alpha-methyl-L-tyrosine
HXQGTXTSDYXIXLDXKAQXXFIKXLLEGSPSSGAPPPS

SEQ ID NO: 154 - protein, 39 aa, synthetic construct
  SITE 2: note = 2-aminoisobutyric acid
  SITE 6: note = (S)-2-amino-3-(2-fluorophenyl)-2-methylpropanoic acid
  SITE 11: note = Alpha-methyl-L-serine
  SITE 13: note = Alpha-methyl-L-leucine
  SITE 16: note = Ornithine
  SITE 20: note = Alpha-methyl-L-3-(4-pyridyl)-L-alanine
  SITE 25: note = Alpha-methyl-L-tyrosine
HXQGTXTSDYXIXLDXKAQXEFIKXLLEGSPSSGAPPPS

SEQ ID NO: 155 - protein, 39 aa, synthetic construct
  SITE 2: note = 2-aminoisobutyric acid
  SITE 6: note = (S)-2-amino-3-(2-fluorophenyl)-2-methylpropanoic acid
  SITE 11: note = Alpha-methyl-L-serine
  SITE 13: note = Alpha-methyl-L-leucine
  SITE 16: note = Ornithine
  SITE 20: note = Alpha-methyl-L-3-(4-pyridyl)-L-alanine
  SITE 21: note = Ornithine
  SITE 24: note = D-Glutamic acid
  SITE 25: note = Alpha-methyl-L-tyrosine
HXQGTXTSDYXIXLDXKAQXXFIEXLIEGSPSSGAPPPS

SEQ ID NO: 156 - protein, 39 aa, synthetic construct
  SITE 2: note = 2-aminoisobutyric acid
  SITE 6: note = (S)-2-amino-3-(2-fluorophenyl)-2-methylpropanoic acid
  SITE 11: note = Alpha-methyl-L-serine
  SITE 13: note = Alpha-methyl-L-leucine
  SITE 16: note = Ornithine
  SITE 20: note = Alpha-methyl-L-3-(4-pyridyl)-L-alanine
  SITE 21: note = Ornithine
  SITE 24: note = D-Glutamic acid
  SITE 25: note = Alpha-methyl-L-tyrosine
HXQGTXTSDYXIXLDXKAQXXFIEXLLEGSPSSGAPPPS

SEQ ID NO: 157 - protein, 39 aa, synthetic construct; identical to SEQ ID NO: 155
  SITE 2: note = 2-aminoisobutyric acid
  SITE 6: note = (S)-2-amino-3-(2-fluorophenyl)-2-methylpropanoic acid
  SITE 11: note = Alpha-methyl-L-serine
  SITE 13: note = Alpha-methyl-L-leucine
  SITE 16: note = Ornithine
  SITE 20: note = Alpha-methyl-L-3-(4-pyridyl)-L-alanine
  SITE 21: note = Ornithine
  SITE 25: note = Alpha-methyl-L-tyrosine

SEQ ID NO: 158 - protein, 39 aa, synthetic construct; identical to SEQ ID NO: 156
  SITE 2: note = 2-aminoisobutyric acid
  SITE 6: note = (S)-2-amino-3-(2-fluorophenyl)-2-methylpropanoic acid
  SITE 11: note = Alpha-methyl-L-serine
  SITE 13: note = Alpha-methyl-L-leucine
  SITE 16: note = Ornithine
  SITE 20: note = Alpha-methyl-L-3-(4-pyridyl)-L-alanine
  SITE 21: note = Ornithine
  SITE 25: note = Alpha-methyl-L-tyrosine

SEQ ID NO: 159 - protein, 39 aa, synthetic construct
  SITE 2: note = 2-aminoisobutyric acid
  SITE 6: note = (S)-2-amino-3-(2-fluorophenyl)-2-methylpropanoic acid
  SITE 11: note = Alpha-methyl-L-serine
  SITE 13: note = Alpha-methyl-L-leucine
  SITE 16: note = Ornithine
  SITE 20: note = Alpha-methyl-L-3-(4-pyridyl)-L-alanine
  SITE 25: note = Alpha-methyl-L-tyrosine
YXQGTXTSDYXIXLDXKAQXEFIEXLLEGSPSSGAPPPS

SEQ ID NO: 160 - protein, 39 aa, synthetic construct; identical to SEQ ID NO: 159
  SITE 2: note = 2-aminoisobutyric acid
  SITE 6: note = (S)-2-amino-3-(2-fluorophenyl)-2-methylpropanoic acid
  SITE 11: note = Alpha-methyl-L-serine
  SITE 13: note = Alpha-methyl-L-leucine
  SITE 16: note = Ornithine
  SITE 20: note = Alpha-methyl-L-3-(4-pyridyl)-L-alanine
  SITE 24: note = D-Glutamic acid
  SITE 25: note = Alpha-methyl-L-tyrosine

SEQ ID NO: 161 - protein, 39 aa, synthetic construct
  SITE 2: note = 2-aminoisobutyric acid
  SITE 6: note = (S)-2-amino-3-(2-fluorophenyl)-2-methylpropanoic acid
  SITE 11: note = Alpha-methyl-L-serine
  SITE 13: note = Alpha-methyl-L-leucine
  SITE 16: note = Ornithine
  SITE 20: note = Alpha-methyl-L-3-(4-pyridyl)-L-alanine
  SITE 21: note = Ornithine
  SITE 25: note = Alpha-methyl-L-tyrosine
YXQGTXTSDYXIXLDXKAQXXFIEXLLEGSPSSGAPPPS

SEQ ID NO: 162 - protein, 39 aa, synthetic construct; identical to SEQ ID NO: 161
  SITE 2: note = 2-aminoisobutyric acid
  SITE 6: note = (S)-2-amino-3-(2-fluorophenyl)-2-methylpropanoic acid
  SITE 11: note = Alpha-methyl-L-serine
  SITE 13: note = Alpha-methyl-L-leucine
  SITE 16: note = Ornithine
  SITE 20: note = Alpha-methyl-L-3-(4-pyridyl)-L-alanine
  SITE 21: note = Ornithine
  SITE 24: note = D-Glutamic acid
  SITE 25: note = Alpha-methyl-L-tyrosine

SEQ ID NO: 163 - protein, 39 aa, synthetic construct
  SITE 2: note = 2-aminoisobutyric acid
  SITE 6: note = (S)-2-amino-3-(2-fluorophenyl)-2-methylpropanoic acid
  SITE 11: note = Alpha-methyl-L-serine
  SITE 13: note = Alpha-methyl-L-leucine
  SITE 16: note = Ornithine
  SITE 20: note = 2-aminoisobutyric acid
  SITE 25: note = Alpha-methyl-L-tyrosine
YXQGTXTSDYXIXLDXKAQXQFIEXLLEGSPSSGAPPPS

SEQ ID NO: 164 - protein, 39 aa, synthetic construct; identical to SEQ ID NO: 161
  SITE 2: note = 2-aminoisobutyric acid
  SITE 6: note = (S)-2-amino-3-(2-fluorophenyl)-2-methylpropanoic acid
  SITE 11: note = Alpha-methyl-L-serine
  SITE 13: note = Alpha-methyl-L-leucine
  SITE 16: note = Ornithine
  SITE 20: note = 2-aminoisobutyric acid
  SITE 21: note = Ornithine
  SITE 24: note = D-Glutamic acid
  SITE 25: note = Alpha-methyl-L-tyrosine

SEQ ID NO: 165 - protein, 39 aa, synthetic construct; identical to SEQ ID NO: 161
  SITE 2: note = 2-aminoisobutyric acid
  SITE 6: note = (S)-2-amino-3-(2-fluorophenyl)-2-methylpropanoic acid
  SITE 11: note = Alpha-methyl-L-serine
  SITE 13: note = Alpha-methyl-L-leucine
  SITE 16: note = Ornithine
  SITE 20: note = 2-aminoisobutyric acid
  SITE 21: note = Ornithine
  SITE 25: note = Alpha-methyl-L-tyrosine

SEQ ID NO: 166 - protein, 39 aa, synthetic construct
  SITE 2: note = 2-aminoisobutyric acid
  SITE 6: note = (S)-2-amino-3-(2-fluorophenyl)-2-methylpropanoic acid
  SITE 11: note = Alpha-methyl-L-serine
  SITE 13: note = Alpha-methyl-L-leucine
  SITE 16: note = Ornithine
  SITE 20: note = 2-aminoisobutyric acid
  SITE 21: note = Ornithine
  SITE 24: note = D-Glutamine
  SITE 25: note = Alpha-methyl-L-tyrosine
YXQGTXTSDYXIXLDXKAQXXFIQXLLEGSPSSGAPPPS

SEQ ID NO: 167 - protein, 39 aa, synthetic construct; identical to SEQ ID NO: 166
  SITE 2: note = 2-aminoisobutyric acid
  SITE 6: note = (S)-2-amino-3-(2-fluorophenyl)-2-methylpropanoic acid
  SITE 11: note = Alpha-methyl-L-serine
  SITE 13: note = Alpha-methyl-L-leucine
  SITE 16: note = Ornithine
  SITE 20: note = 2-aminoisobutyric acid
  SITE 21: note = Ornithine
  SITE 25: note = Alpha-methyl-L-tyrosine

SEQ ID NO: 168 - protein, 39 aa, synthetic construct; identical to SEQ ID NO: 159
  SITE 2: note = 2-aminoisobutyric acid
  SITE 6: note = (S)-2-amino-3-(2-fluorophenyl)-2-methylpropanoic acid
  SITE 11: note = Alpha-methyl-L-serine
  SITE 13: note = Alpha-methyl-L-leucine
  SITE 16: note = Ornithine
  SITE 20: note = 2-aminoisobutyric acid
  SITE 24: note = D-Glutamic acid
  SITE 25: note = Alpha-methyl-L-tyrosine

SEQ ID NO: 169 - protein, 39 aa, synthetic construct; identical to SEQ ID NO: 159
  SITE 2: note = 2-aminoisobutyric acid
  SITE 6: note = (S)-2-amino-3-(2-fluorophenyl)-2-methylpropanoic acid
  SITE 11: note = Alpha-methyl-L-serine
  SITE 13: note = Alpha-methyl-L-leucine
  SITE 16: note = Ornithine
  SITE 20: note = 2-aminoisobutyric acid
  SITE 25: note = Alpha-methyl-L-tyrosine

SEQ ID NO: 170 - protein, 39 aa, synthetic construct; identical to SEQ ID NO: 116
  SITE 2: note = 2-aminoisobutyric acid
  SITE 6: note = (S)-2-amino-3-(2-fluorophenyl)-2-methylpropanoic acid
  SITE 11: note = Alpha-methyl-L-serine
  SITE 13: note = Alpha-methyl-L-leucine
  SITE 16: note = Ornithine
  SITE 20: note = 2-aminoisobutyric acid
  SITE 24: note = D-Glutamine
  SITE 25: note = Alpha-methyl-L-tyrosine

SEQ ID NO: 171 - protein, 39 aa, synthetic construct; identical to SEQ ID NO: 144
  SITE 2: note = 1-Aminocyclobutane-1-carboxylic acid
  SITE 6: note = (S)-2-amino-3-(2-fluorophenyl)-2-methylpropanoic acid
  SITE 11: note = Alpha-methyl-L-serine
  SITE 13: note = Alpha-methyl-L-leucine
  SITE 16: note = Ornithine
  SITE 20: note = Alpha-methyl-L-3-(4-pyridyl)-L-alanine
  SITE 25: note = Alpha-methyl-L-tyrosine

SEQ ID NO: 172 - protein, 39 aa, synthetic construct
  SITE 2: note = D-Alanine
  SITE 6: note = (S)-2-amino-3-(2-fluorophenyl)-2-methylpropanoic acid
  SITE 11: note = Alpha-methyl-L-serine
  SITE 13: note = Alpha-methyl-L-leucine
  SITE 16: note = Ornithine
  SITE 20: note = Alpha-methyl-L-3-(4-pyridyl)-L-alanine
  SITE 25: note = Alpha-methyl-L-tyrosine
YAQGTXTSDYXIXLDXKAQXEFIEXLIEGSPSSGAPPPS

SEQ ID NO: 173 - protein, 39 aa, synthetic construct
  SITE 2: note = D-Alanine
  SITE 6: note = (S)-2-amino-3-(2-fluorophenyl)-2-methylpropanoic acid
  SITE 11: note = Alpha-methyl-L-serine
  SITE 13: note = Alpha-methyl-L-leucine
  SITE 16: note = Ornithine
  SITE 20: note = Alpha-methyl-L-3-(4-pyridyl)-L-alanine
  SITE 21: note = Ornithine
  SITE 25: note = Alpha-methyl-L-tyrosine
YAQGTXTSDYXIXLDXKAQXXFIEXLIEGSPSSGAPPPS

SEQ ID NO: 174 - protein, 39 aa, synthetic construct; identical to SEQ ID NO: 173
  SITE 2: note = D-Alanine
  SITE 6: note = (S)-2-amino-3-(2-fluorophenyl)-2-methylpropanoic acid
  SITE 11: note = Alpha-methyl-L-serine
  SITE 13: note = Alpha-methyl-L-leucine
  SITE 16: note = Ornithine
  SITE 20: note = Alpha-methyl-L-3-(4-pyridyl)-L-alanine
  SITE 21: note = Ornithine
  SITE 24: note = D-Glutamic acid
  SITE 25: note = Alpha-methyl-L-tyrosine

SEQ ID NO: 175 - protein, 39 aa, synthetic construct
  SITE 2: note = D-Alanine
  SITE 6: note = (S)-2-amino-3-(2-fluorophenyl)-2-methylpropanoic acid
  SITE 11: note = Alpha-methyl-L-serine
  SITE 13: note = Alpha-methyl-L-leucine
  SITE 16: note = Ornithine
  SITE 20: note = Alpha-methyl-L-3-(4-pyridyl)-L-alanine
  SITE 25: note = Alpha-methyl-L-tyrosine
YAQGTXTSDYXIXLDXKAQXEFIEXLLEGSPSSGAPPPS

SEQ ID NO: 176 - protein, 39 aa, synthetic construct; identical to SEQ ID NO: 175
  SITE 2: note = D-Alanine
  SITE 6: note = (S)-2-amino-3-(2-fluorophenyl)-2-methylpropanoic acid
  SITE 11: note = Alpha-methyl-L-serine
  SITE 13: note = Alpha-methyl-L-leucine
  SITE 16: note = Ornithine
  SITE 20: note = Alpha-methyl-L-3-(4-pyridyl)-L-alanine
  SITE 24: note = D-Glutamic acid
  SITE 25: note = Alpha-methyl-L-tyrosine

SEQ ID NO: 177 - protein, 39 aa, synthetic construct
  SITE 2: note = D-Alanine
  SITE 6: note = (S)-2-amino-3-(2-fluorophenyl)-2-methylpropanoic acid
  SITE 11: note = Alpha-methyl-L-serine
  SITE 13: note = Alpha-methyl-L-leucine
  SITE 16: note = Ornithine
  SITE 20: note = Alpha-methyl-L-3-(4-pyridyl)-L-alanine
  SITE 21: note = Ornithine
  SITE 25: note = Alpha-methyl-L-tyrosine
YAQGTXTSDYXIXLDXKAQXXFIEXLLEGSPSSGAPPPS

SEQ ID NO: 178 - protein, 39 aa, synthetic construct
  SITE 2: note = D-Alanine
  SITE 6: note = (S)-2-amino-3-(2-fluorophenyl)-2-methylpropanoic acid
  SITE 11: note = Alpha-methyl-L-serine
  SITE 13: note = Alpha-methyl-L-leucine
  SITE 16: note = Ornithine
  SITE 20: note = 2-aminoisobutyric acid
  SITE 21: note = Ornithine
  SITE 24: note = D-Glutamine
  SITE 25: note = Alpha-methyl-L-tyrosine
YAQGTXTSDYXIXLDXKAQXXFIQXLLEGSPSSGAPPPS

SEQ ID NO: 179 - protein, 39 aa, synthetic construct; identical to SEQ ID NO: 178
  SITE 2: note = D-Alanine
  SITE 6: note = (S)-2-amino-3-(2-fluorophenyl)-2-methylpropanoic acid
  SITE 11: note = Alpha-methyl-L-serine
  SITE 13: note = Alpha-methyl-L-leucine
  SITE 16: note = Ornithine
  SITE 20: note = 2-aminoisobutyric acid
  SITE 21: note = Ornithine
  SITE 25: note = Alpha-methyl-L-tyrosine

SEQ ID NO: 180 - protein, 39 aa, synthetic construct; identical to SEQ ID NO: 173
  SITE 2: note = D-Alanine
  SITE 6: note = (S)-2-amino-3-(2-fluorophenyl)-2-methylpropanoic acid
  SITE 11: note = Alpha-methyl-L-serine
  SITE 13: note = Alpha-methyl-L-leucine
  SITE 16: note = Ornithine
  SITE 20: note = 2-aminoisobutyric acid
  SITE 21: note = Ornithine
  SITE 25: note = Alpha-methyl-L-tyrosine

SEQ ID NO: 181 - protein, 39 aa, synthetic construct
  SITE 2: note = 2-aminoisobutyric acid
  SITE 6: note = (S)-2-amino-3-(2-fluorophenyl)-2-methylpropanoic acid
  SITE 10: note = 3-(4-pyridyl)-L-alanine
  SITE 13: note = Alpha-methyl-L-leucine
  SITE 16: note = Ornithine
  SITE 20: note = Alpha-methyl-L-3-(4-pyridyl)-L-alanine
  SITE 25: note = Alpha-methyl-L-tyrosine
YXQGTXTSDXSIXLDXKAQXEFIEXLIEGSPSSGAPPPS

SEQ ID NO: 182 - protein, 39 aa, synthetic construct; identical to SEQ ID NO: 97
  SITE 2: note = 2-aminoisobutyric acid
  SITE 6: note = (S)-2-amino-3-(2-fluorophenyl)-2-methylpropanoic acid
  SITE 11: note = Alpha-methyl-L-serine
  SITE 13: note = Alpha-methyl-L-leucine
  SITE 16: note = Ornithine
  SITE 20: note = 2-aminoisobutyric acid
  SITE 21: note = Ornithine
  SITE 25: note = Alpha-methyl-L-tyrosine

SEQ ID NO: 183 - protein, 39 aa, synthetic construct; identical to SEQ ID NO: 130
  SITE 2: note = 2-aminoisobutyric acid
  SITE 6: note = (S)-2-amino-3-(2-fluorophenyl)-2-methylpropanoic acid
  SITE 10: note = 3-(4-pyridyl)-L-alanine
  SITE 11: note = Alpha-methyl-L-serine
  SITE 13: note = Alpha-methyl-L-leucine
  SITE 16: note = Ornithine
  SITE 20: note = Alpha-methyl-L-3-(4-pyridyl)-L-alanine
  SITE 24: note = D-Glutamic acid
  SITE 25: note = Alpha-methyl-L-tyrosine

SEQ ID NO: 184 - protein, 39 aa, synthetic construct; identical to SEQ ID NO: 97
  SITE 2: note = 2-aminoisobutyric acid
  SITE 6: note = (S)-2-amino-3-(2-fluorophenyl)-2-methylpropanoic acid
  SITE 11: note = Alpha-methyl-L-serine
  SITE 13: note = Alpha-methyl-L-leucine
  SITE 16: note = Ornithine
  SITE 20: note = 2-aminoisobutyric acid
  SITE 21: note = Ornithine
  SITE 24: note = D-Glutamic acid
  SITE 25: note = Alpha-methyl-L-tyrosine

SEQ ID NO: 185 - protein, 39 aa, synthetic construct
  SITE 1: note = N-Methyl-L-tyrosine
  SITE 2: note = 2-aminoisobutyric acid
  SITE 6: note = (S)-2-amino-3-(2-fluorophenyl)-2-methylpropanoic acid
  SITE 11: note = Alpha-methyl-L-serine
  SITE 13: note = Alpha-methyl-L-leucine
  SITE 16: note = Ornithine
  SITE 20: note = Alpha-methyl-L-3-(4-pyridyl)-L-alanine
  SITE 25: note = Alpha-methyl-L-tyrosine
XXQGTXTSDYXIXLDXKAQXEFIEXLIEGSPSSGAPPPS

SEQ ID NO: 186 - protein, 39 aa, synthetic construct
  SITE 2: note = 2-aminoisobutyric acid
  SITE 6: note = (S)-2-amino-3-(2-fluorophenyl)-2-methylpropanoic acid
  SITE 11: note = Alpha-methyl-L-serine
  SITE 13: note = Alpha-methyl-L-leucine
  SITE 16: note = Ornithine
  SITE 20: note = Alpha-methyl-L-3-(4-pyridyl)-L-alanine
  SITE 21: note = Ornithine
  SITE 25: note = Alpha-methyl-L-tyrosine
  SITE 29: note = 2-aminoisobutyric acid
YXQGTXTSDYXIXLDXKAQXXFIQXLIEXSPSSGAPPPS

SEQ ID NO: 187 - protein, 39 aa, synthetic construct; identical to SEQ ID NO: 1
  SITE 2: note = 2-aminoisobutyric acid
  SITE 6: note = (S)-2-amino-3-(2-fluorophenyl)-2-methylpropanoic acid
  SITE 10: note = 3-(4-pyridyl)-L-alanine
  SITE 13: note = Alpha-methyl-L-leucine
  SITE 17: note = Lysine is chemically modified through conjugation of the side chain with (2-[2-(2-amino-ethoxy)-ethoxy]-acetyl)2-Gamma-Glutamic acid-CO-(CH2)16-CO2H
  SITE 20: note = 2-aminoisobutyric acid
  SITE 24: note = D-Glutamic acid
  SITE 25: note = Alpha-methyl-L-tyrosine

SEQ ID NO: 188 - protein, 39 aa, synthetic construct; identical to SEQ ID NO: 2
  SITE 2: note = 2-aminoisobutyric acid
  SITE 6: note = (S)-2-amino-3-(2-fluorophenyl)-2-methylpropanoic acid
  SITE 10: note = 3-(4-pyridyl)-L-alanine
  SITE 13: note = Alpha-methyl-L-leucine
  SITE 16: note = Ornithine
  SITE 17: note = Lysine is chemically modified through conjugation of the side chain with (2-[2-(2-amino-ethoxy)-ethoxy]-acetyl)2-Gamma-Glutamic acid-CO-(CH2)16-CO2H
  SITE 20: note = 2-aminoisobutyric acid
  SITE 24: note = D-Glutamic acid
  SITE 25: note = Alpha-methyl-L-tyrosine

SEQ ID NO: 189 - protein, 31 aa, synthetic construct; identical to SEQ ID NO: 3
  SITE 2: note = 2-aminoisobutyric acid
  SITE 6: note = (S)-2-amino-3-(2-fluorophenyl)-2-methylpropanoic acid
  SITE 10: note = 3-(4-pyridyl)-L-alanine
  SITE 13: note = Alpha-methyl-L-leucine
  SITE 17: note = Lysine is chemically modified through conjugation of the side chain with (2-[2-(2-amino-ethoxy)-ethoxy]-acetyl)2-Gamma-Glutamic acid-CO-(CH2)16-CO2H
  SITE 20: note = 2-aminoisobutyric acid
  SITE 24: note = D-Glutamic acid
  SITE 25: note = Alpha-methyl-L-tyrosine

SEQ ID NO: 190 - protein, 39 aa, synthetic construct; identical to SEQ ID NO: 1
  SITE 2: note = 2-aminoisobutyric acid
  SITE 6: note = (S)-2-amino-3-(2-fluorophenyl)-2-methylpropanoic acid
  SITE 10: note = 3-(4-pyridyl)-L-alanine
  SITE 13: note = Alpha-methyl-L-leucine
  SITE 17: note = Lysine is chemically modified through conjugation of the side chain with (2-[2-(2-amino-ethoxy)-ethoxy]-acetyl)2-Gamma-Glutamic acid-CO-(CH2)16-CO2H
  SITE 20: note = 2-aminoisobutyric acid
  SITE 25: note = Alpha-methyl-L-tyrosine

SEQ ID NO: 191 - protein, 39 aa, synthetic construct; identical to SEQ ID NO: 5
  SITE 2: note = 2-aminoisobutyric acid
  SITE 6: note = (S)-2-amino-3-(2-fluorophenyl)-2-methylpropanoic acid
  SITE 10: note = 3-(4-pyridyl)-L-alanine
  SITE 11: note = 2-aminoisobutyric acid
  SITE 13: note = Alpha-methyl-L-leucine
  SITE 17: note = Lysine is chemically modified through conjugation of the side chain with (2-[2-(2-amino-ethoxy)-ethoxy]-acetyl)2-Gamma-Glutamic acid-CO-(CH2)16-CO2H
  SITE 20: note = 2-aminoisobutyric acid
  SITE 25: note = Alpha-methyl-L-tyrosine

SEQ ID NO: 192 - protein, 39 aa, synthetic construct; identical to SEQ ID NO: 6
  SITE 2: note = 2-aminoisobutyric acid
  SITE 6: note = (S)-2-amino-3-(2-fluorophenyl)-2-methylpropanoic acid
  SITE 10: note = 3-(4-pyridyl)-L-alanine
  SITE 11: note = 2-aminoisobutyric acid
  SITE 13: note = Alpha-methyl-L-leucine
  SITE 17: note = Lysine is chemically modified through conjugation of the side chain with (2-[2-(2-amino-ethoxy)-ethoxy]-acetyl)2-Gamma-Glutamic acid-CO-(CH2)16-CO2H
  SITE 20: note = 2-aminoisobutyric acid
  SITE 25: note = Alpha-methyl-L-tyrosine

SEQ ID NO: 193 - protein, 39 aa, synthetic construct; identical to SEQ ID NO: 7
  SITE 2: note = 2-aminoisobutyric acid
  SITE 6: note = (S)-2-amino-3-(2-fluorophenyl)-2-methylpropanoic acid
  SITE 10: note = 3-(4-pyridyl)-L-alanine
  SITE 13: note = Alpha-methyl-L-leucine
  SITE 17: note = Lysine is chemically modified through conjugation of the side chain with (2-[2-(2-amino-ethoxy)-ethoxy]-acetyl)2-Gamma-Glutamic acid-CO-(CH2)16-CO2H
  SITE 20: note = 2-aminoisobutyric acid
  SITE 25: note = Alpha-methyl-L-tyrosine

SEQ ID NO: 194 - protein, 39 aa, synthetic construct; identical to SEQ ID NO: 8
  SITE 2: note = 2-aminoisobutyric acid
  SITE 6: note = (S)-2-amino-3-(2-fluorophenyl)-2-methylpropanoic acid
  SITE 11: note = 2-aminoisobutyric acid
  SITE 13: note = Alpha-methyl-L-leucine
  SITE 17: note = Lysine is chemically modified through conjugation of the side chain with (2-[2-(2-amino-ethoxy)-ethoxy]-acetyl)2-Gamma-Glutamic acid-CO-(CH2)16-CO2H
  SITE 20: note = 2-aminoisobutyric acid
  SITE 24: note = D-Glutamic acid
  SITE 25: note = Alpha-methyl-L-tyrosine

SEQ ID NO: 195 - protein, 39 aa, synthetic construct; identical to SEQ ID NO: 9
  SITE 2: note = 2-aminoisobutyric acid
  SITE 6: note = (S)-2-amino-3-(2-fluorophenyl)-2-methylpropanoic acid
  SITE 11: note = 2-aminoisobutyric acid
  SITE 13: note = Alpha-methyl-L-leucine
  SITE 16: note = Ornithine
  SITE 17: note = Lysine is chemically modified through conjugation of the side chain with (2-[2-(2-amino-ethoxy)-ethoxy]-acetyl)2-Gamma-Glutamic acid-CO-(CH2)16-CO2H
  SITE 20: note = 2-aminoisobutyric acid
  SITE 24: note = D-Glutamic acid
  SITE 25: note = Alpha-methyl-L-tyrosine

SEQ ID NO: 196 - protein, 39 aa, synthetic construct; identical to SEQ ID NO: 9
  SITE 2: note = 2-aminoisobutyric acid
  SITE 6: note = (S)-2-amino-3-(2-fluorophenyl)-2-methylpropanoic acid
  SITE 11: note = 2-aminoisobutyric acid
  SITE 13: note = Alpha-methyl-L-leucine
  SITE 16: note = Ornithine
  SITE 17: note = Lysine is chemically modified through conjugation of the side chain with (2-[2-(2-amino-ethoxy)-ethoxy]-acetyl)2-Gamma-Glutamic acid-CO-(CH2)16-CO2H
  SITE 20: note = 2-aminoisobutyric acid
  SITE 25: note = Alpha-methyl-L-tyrosine

SEQ ID NO: 197 - protein, 41 aa, synthetic construct; identical to SEQ ID NO: 11
  SITE 2: note = 2-aminoisobutyric acid
  SITE 6: note = (S)-2-amino-3-(2-fluorophenyl)-2-methylpropanoic acid
  SITE 10: note = 3-(4-pyridyl)-L-alanine
  SITE 13: note = Alpha-methyl-L-leucine
  SITE 17: note = Lysine is chemically modified through conjugation of the side chain with (2-[2-(2-amino-ethoxy)-ethoxy]-acetyl)2-Gamma-Glutamic acid-CO-(CH2)16-CO2H
  SITE 20: note = 2-aminoisobutyric acid
  SITE 25: note = Alpha-methyl-L-tyrosine

SEQ ID NO: 198 - protein, 41 aa, synthetic construct; identical to SEQ ID NO: 12
  SITE 2: note = 2-aminoisobutyric acid
  SITE 6: note = (S)-2-amino-3-(2-fluorophenyl)-2-methylpropanoic acid
  SITE 10: note = 3-(4-pyridyl)-L-alanine
  SITE 13: note = Alpha-methyl-L-leucine
  SITE 17: note = Lysine is chemically modified through conjugation of the side chain with (2-[2-(2-amino-ethoxy)-ethoxy]-acetyl)2-Gamma-Glutamic acid-CO-(CH2)16-CO2H
  SITE 20: note = 2-aminoisobutyric acid
  SITE 24: note = D-Glutamic acid
  SITE 25: note = Alpha-methyl-L-tyrosine

SEQ ID NO: 199 - protein, 30 aa, synthetic construct; identical to SEQ ID NO: 13
  SITE 2: note = 2-aminoisobutyric acid
  SITE 6: note = (S)-2-amino-3-(2-fluorophenyl)-2-methylpropanoic acid
  SITE 10: note = 3-(4-pyridyl)-L-alanine
  SITE 13: note = Alpha-methyl-L-leucine
  SITE 17: note = Lysine is chemically modified through conjugation of the side chain with (2-[2-(2-amino-ethoxy)-ethoxy]-acetyl)2-Gamma-Glutamic acid-CO-(CH2)16-CO2H
  SITE 20: note = 2-aminoisobutyric acid
  SITE 24: note = D-Glutamic acid
  SITE 25: note = Alpha-methyl-L-tyrosine

SEQ ID NO: 200 - protein, 29 aa, synthetic construct
  SITE 2: note = 2-aminoisobutyric acid
  SITE 6: note = (S)-2-amino-3-(2-fluorophenyl)-2-methylpropanoic acid
  SITE 10: note = 3-(4-pyridyl)-L-alanine
  SITE 13: note = Alpha-methyl-L-leucine
  SITE 17: note = Lysine is chemically modified through conjugation of the side chain with (2-[2-(2-amino-ethoxy)-ethoxy]-acetyl)2-Gamma-Glutamic acid-CO-(CH2)16-CO2H
  SITE 20: note = 2-aminoisobutyric acid
  SITE 24: note = D-Glutamic acid
  SITE 25: note = Alpha-methyl-L-tyrosine
YXEGTXTSDXSIXLDEKAQXEFIEXLIEG

SEQ ID NO: 201 - protein, 39 aa, synthetic construct; identical to SEQ ID NO: 1
  SITE 2: note = 2-aminoisobutyric acid
  SITE 6: note = (S)-2-amino-3-(2-fluorophenyl)-2-methylpropanoic acid
  SITE 10: note = 3-(4-pyridyl)-L-alanine
  SITE 13: note = Alpha-methyl-L-leucine
  SITE 17: note = Lysine is chemically modified through conjugation of the side chain with epsilon-Lysine-epsilon-Lysine-Gamma-Glutamic acid-CO-(CH2)16-CO2H
  SITE 20: note = 2-aminoisobutyric acid
  SITE 24: note = D-Glutamic acid
  SITE 25: note = Alpha-methyl-L-tyrosine

SEQ ID NO: 202 - protein, 31 aa, synthetic construct; identical to SEQ ID NO: 3
  SITE 2: note = 2-aminoisobutyric acid
  SITE 6: note = (S)-2-amino-3-(2-fluorophenyl)-2-methylpropanoic acid
  SITE 10: note = 3-(4-pyridyl)-L-alanine
  SITE 13: note = Alpha-methyl-L-leucine
  SITE 17: note = Lysine is chemically modified through conjugation of the side chain with (2-[2-(2-amino-ethoxy)-ethoxy]-acetyl)2-Gamma-Glutamic acid-CO-(CH2)16-CO2H
  SITE 20: note = 2-aminoisobutyric acid
  SITE 25: note = Alpha-methyl-L-tyrosine

SEQ ID NO: 203 - protein, 31 aa, synthetic construct; identical to SEQ ID NO: 16
  SITE 2: note = 2-aminoisobutyric acid
  SITE 6: note = (S)-2-amino-3-(2-fluorophenyl)-2-methylpropanoic acid
  SITE 10: note = 3-(4-pyridyl)-L-alanine
  SITE 11: note = 2-aminoisobutyric acid
  SITE 13: note = Alpha-methyl-L-leucine
  SITE 17: note = Lysine is chemically modified through conjugation of the side chain with (2-[2-(2-amino-ethoxy)-ethoxy]-acetyl)2-Gamma-Glutamic acid-CO-(CH2)16-CO2H
  SITE 20: note = 2-aminoisobutyric acid
  SITE 25: note = Alpha-methyl-L-tyrosine

SEQ ID NO: 204 - protein, 31 aa, synthetic construct; identical to SEQ ID NO: 17
  SITE 2: note = 2-aminoisobutyric acid
  SITE 6: note = (S)-2-amino-3-(2-fluorophenyl)-2-methylpropanoic acid
  SITE 10: note = 3-(4-pyridyl)-L-alanine
  SITE 13: note = Alpha-methyl-L-leucine
  SITE 17: note = Lysine is chemically modified through conjugation of the side chain with (2-[2-(2-amino-ethoxy)-ethoxy]-acetyl)2-Gamma-Glutamic acid-CO-(CH2)16-CO2H
  SITE 20: note = 2-aminoisobutyric acid
  SITE 25: note = Alpha-methyl-L-tyrosine

SEQ ID NO: 205 - protein, 31 aa, synthetic construct; identical to SEQ ID NO: 18
  SITE 2: note = 2-aminoisobutyric acid
  SITE 6: note = (S)-2-amino-3-(2-fluorophenyl)-2-methylpropanoic acid
  SITE 11: note = 2-aminoisobutyric acid
  SITE 13: note = Alpha-methyl-L-leucine
  SITE 17: note = Lysine is chemically modified through conjugation of the side chain with (2-[2-(2-amino-ethoxy)-ethoxy]-acetyl)2-Gamma-Glutamic acid-CO-(CH2)16-CO2H
  SITE 20: note = 2-aminoisobutyric acid
  SITE 24: note = D-Glutamic acid
  SITE 25: note = Alpha-methyl-L-tyrosine

SEQ ID NO: 206 - protein, 31 aa, synthetic construct; identical to SEQ ID NO: 19
  SITE 2: note = 2-aminoisobutyric acid
  SITE 6: note = (S)-2-amino-3-(2-fluorophenyl)-2-methylpropanoic acid
  SITE 11: note = 2-aminoisobutyric acid
  SITE 13: note = Alpha-methyl-L-leucine
  SITE 16: note = Ornithine
  SITE 17: note = Lysine is chemically modified through conjugation of the side chain with (2-[2-(2-amino-ethoxy)-ethoxy]-acetyl)2-Gamma-Glutamic acid-CO-(CH2)16-CO2H
  SITE 20: note = 2-aminoisobutyric acid
  SITE 24: note = D-Glutamic acid
  SITE 25: note = Alpha-methyl-L-tyrosine

SEQ ID NO: 207 - protein, 31 aa, synthetic construct; identical to SEQ ID NO: 19
  SITE 2: note = 2-aminoisobutyric acid
  SITE 6: note = (S)-2-amino-3-(2-fluorophenyl)-2-methylpropanoic acid
  SITE 11: note = 2-aminoisobutyric acid
  SITE 13: note = Alpha-methyl-L-leucine
  SITE 16: note = Ornithine
  SITE 17: note = Lysine is chemically modified through conjugation of the side chain with (2-[2-(2-amino-ethoxy)-ethoxy]-acetyl)2-Gamma-Glutamic acid-CO-(CH2)16-CO2H
  SITE 20: note = 2-aminoisobutyric acid
  SITE 25: note = Alpha-methyl-L-tyrosine

SEQ ID NO: 208 - protein, 31 aa, synthetic construct; identical to SEQ ID NO: 21
  SITE 2: note = 2-aminoisobutyric acid
  SITE 6: note = (S)-2-amino-3-(2-fluorophenyl)-2-methylpropanoic acid
  SITE 10: note = 3-(4-pyridyl)-L-alanine
  SITE 13: note = Alpha-methyl-L-leucine
  SITE 16: note = Ornithine
  SITE 17: note = Lysine is chemically modified through conjugation of the side chain with (2-[2-(2-amino-ethoxy)-ethoxy]-acetyl)2-Gamma-Glutamic acid-CO-(CH2)16-CO2H
  SITE 20: note = 2-aminoisobutyric acid
  SITE 25: note = Alpha-methyl-L-tyrosine

SEQ ID NO: 209 - protein, 31 aa, synthetic construct; identical to SEQ ID NO: 22
  SITE 2: note = 2-aminoisobutyric acid
  SITE 6: note = (S)-2-amino-3-(2-fluorophenyl)-2-methylpropanoic acid
  SITE 10: note = 3-(4-pyridyl)-L-alanine
  SITE 11: note = 2-aminoisobutyric acid
  SITE 13: note = Alpha-methyl-L-leucine
  SITE 16: note = Ornithine
  SITE 17: note = Lysine is chemically modified through conjugation of the side chain with (2-[2-(2-amino-ethoxy)-ethoxy]-acetyl)2-Gamma-Glutamic acid-CO-(CH2)16-CO2H
  SITE 20: note = 2-aminoisobutyric acid
  SITE 25: note = Alpha-methyl-L-tyrosine

SEQ ID NO: 210 - protein, 31 aa, synthetic construct; identical to SEQ ID NO: 23
  SITE 2: note = 2-aminoisobutyric acid
  SITE 6: note = (S)-2-amino-3-(2-fluorophenyl)-2-methylpropanoic acid
  SITE 10: note = 3-(4-pyridyl)-L-alanine
  SITE 13: note = Alpha-methyl-L-leucine
  SITE 16: note = Ornithine
  SITE 17: note = Lysine is chemically modified through conjugation of the side chain with (2-[2-(2-amino-ethoxy)-ethoxy]-acetyl)2-Gamma-Glutamic acid-CO-(CH2)16-CO2H
  SITE 20: note = 2-aminoisobutyric acid
  SITE 25: note = Alpha-methyl-L-tyrosine

SEQ ID NO: 211 - protein, 41 aa, synthetic construct; identical to SEQ ID NO: 12
  SITE 2: note = 2-aminoisobutyric acid
  SITE 6: note = (S)-2-amino-3-(2-fluorophenyl)-2-methylpropanoic acid
  SITE 10: note = 3-(4-pyridyl)-L-alanine
  SITE 13: note = Alpha-methyl-L-leucine
  SITE 17: note = Lysine is chemically modified through conjugation of the side chain with (2-[2-(2-amino-ethoxy)-ethoxy]-acetyl)2-Gamma-Glutamic acid-CO-(CH2)16-CO2H
  SITE 20: note = 2-aminoisobutyric acid
  SITE 25: note = Alpha-methyl-L-tyrosine

SEQ ID NO: 212 - protein, 39 aa, synthetic construct; identical to SEQ ID NO: 25
  SITE 2: note = 2-aminoisobutyric acid
  SITE 6: note = (S)-2-amino-3-(2-fluorophenyl)-2-methylpropanoic acid
  SITE 10: note = 3-(4-pyridyl)-L-alanine
  SITE 13: note = Alpha-methyl-L-leucine
  SITE 16: note = Ornithine
  SITE 17: note = Lysine is chemically modified through conjugation of the side chain with (2-[2-(2-amino-ethoxy)-ethoxy]-acetyl)2-Gamma-Glutamic acid-CO-(CH2)16-CO2H
  SITE 20: note = 2-aminoisobutyric acid
  SITE 25: note = Alpha-methyl-L-tyrosine

SEQ ID NO: 213 - protein, 31 aa, synthetic construct; identical to SEQ ID NO: 26
  SITE 2: note = 2-aminoisobutyric acid
  SITE 6: note = (S)-2-amino-3-(2-fluorophenyl)-2-methylpropanoic acid
  SITE 10: note = 3-(4-pyridyl)-L-alanine
  SITE 11: note = 2-aminoisobutyric acid
  SITE 13: note = Alpha-methyl-L-leucine
  SITE 16: note = Ornithine
  SITE 17: note = Lysine is chemically modified through conjugation of the side chain with (2-[2-(2-amino-ethoxy)-ethoxy]-acetyl)2-Gamma-Glutamic acid-CO-(CH2)16-CO2H
  SITE 20: note = 2-aminoisobutyric acid
  SITE 25: note = Alpha-methyl-L-tyrosine

SEQ ID NO: 214 - protein, 31 aa, synthetic construct; identical to SEQ ID NO: 22
  SITE 2: note = 2-aminoisobutyric acid
  SITE 6: note = (S)-2-amino-3-(2-fluorophenyl)-2-methylpropanoic acid
  SITE 10: note = 3-(4-pyridyl)-L-alanine
  SITE 11: note = 2-aminoisobutyric acid
  SITE 13: note = Alpha-methyl-L-leucine
  SITE 16: note = Ornithine
  SITE 17: note = Lysine is chemically modified through conjugation of the side chain with (2-[2-(2-amino-ethoxy)-ethoxy]-acetyl)2-Gamma-Glutamic acid-CO-(CH2)16-CO2H
  SITE 20: note = 2-aminoisobutyric acid
  SITE 24: note = D-Glutamic acid
  SITE 25: note = Alpha-methyl-L-tyrosine

SEQ ID NO: 215 - protein, 41 aa, synthetic construct; identical to SEQ ID NO: 28
  SITE 2: note = 2-aminoisobutyric acid
  SITE 6: note = (S)-2-amino-3-(2-fluorophenyl)-2-methylpropanoic acid
  SITE 10: note = 3-(4-pyridyl)-L-alanine
  SITE 13: note = Alpha-methyl-L-leucine
  SITE 16: note = Ornithine
  SITE 17: note = Lysine is chemically modified through conjugation of the side chain with (2-[2-(2-amino-ethoxy)-ethoxy]-acetyl)2-Gamma-Glutamic acid-CO-(CH2)16-CO2H
  SITE 20: note = 2-aminoisobutyric acid
  SITE 25: note = Alpha-methyl-L-tyrosine

SEQ ID NO: 216 - protein, 41 aa, synthetic construct; identical to SEQ ID NO: 29
  SITE 2: note = 2-aminoisobutyric acid
  SITE 6: note = (S)-2-amino-3-(2-fluorophenyl)-2-methylpropanoic acid
  SITE 10: note = 3-(4-pyridyl)-L-alanine
  SITE 11: note = 2-aminoisobutyric acid
  SITE 13: note = Alpha-methyl-L-leucine
  SITE 16: note = Ornithine
  SITE 17: note = Lysine is chemically modified through conjugation of the side chain with (2-[2-(2-amino-ethoxy)-ethoxy]-acetyl)2-Gamma-Glutamic acid-CO-(CH2)16-CO2H
  SITE 20: note = 2-aminoisobutyric acid
  SITE 25: note = Alpha-methyl-L-tyrosine

SEQ ID NO: 217 - protein, 40 aa, synthetic construct; identical to SEQ ID NO: 30
  SITE 2: note = 2-aminoisobutyric acid
  SITE 6: note = (S)-2-amino-3-(2-fluorophenyl)-2-methylpropanoic acid
  SITE 10: note = 3-(4-pyridyl)-L-alanine
  SITE 11: note = 2-aminoisobutyric acid
  SITE 13: note = Alpha-methyl-L-leucine
  SITE 16: note = Ornithine
  SITE 17: note = Lysine is chemically modified through conjugation of the side chain with epsilon-Lysine-epsilon-Lysine-Gamma-Glutamic acid-CO-(CH2)16-CO2H
  SITE 20: note = 2-aminoisobutyric acid
  SITE 25: note = Alpha-methyl-L-tyrosine

SEQ ID NO: 218 - protein, 40 aa, synthetic construct; identical to SEQ ID NO: 31
  SITE 2: note = 2-aminoisobutyric acid
  SITE 6: note = (S)-2-amino-3-(2-fluorophenyl)-2-methylpropanoic acid
  SITE 10: note = 3-(4-pyridyl)-L-alanine
  SITE 11: note = 2-aminoisobutyric acid
  SITE 13: note = Alpha-methyl-L-leucine
  SITE 16: note = Ornithine
  SITE 17: note = Lysine is chemically modified through conjugation of the side chain with epsilon-Lysine-epsilon-Lysine-Gamma-Glutamic acid-CO-(CH2)16-CO2H
  SITE 20: note = 2-aminoisobutyric acid
  SITE 25: note = Alpha-methyl-L-tyrosine

SEQ ID NO: 219 - protein, 40 aa, synthetic construct; identical to SEQ ID NO: 32
  SITE 2: note = 2-aminoisobutyric acid
  SITE 6: note = (S)-2-amino-3-(2-fluorophenyl)-2-methylpropanoic acid
  SITE 10: note = 3-(4-pyridyl)-L-alanine
  SITE 11: note = 2-aminoisobutyric acid
  SITE 13: note = Alpha-methyl-L-leucine
  SITE 16: note = Ornithine
  SITE 17: note = Lysine is chemically modified through conjugation of the side chain with epsilon-Lysine-epsilon-Lysine-Gamma-Glutamic acid-CO-(CH2)16-CO2H
  SITE 20: note = 2-aminoisobutyric acid
  SITE 25: note = Alpha-methyl-L-tyrosine
  SITE 31: note = Ornithine

SEQ ID NO: 220 - protein, 40 aa, synthetic construct; identical to SEQ ID NO: 33
  SITE 2: note = 2-aminoisobutyric acid
  SITE 6: note = (S)-2-amino-3-(2-fluorophenyl)-2-methylpropanoic acid
  SITE 10: note = 3-(4-pyridyl)-L-alanine
  SITE 11: note = 2-aminoisobutyric acid
  SITE 13: note = Alpha-methyl-L-leucine
  SITE 16: note = Ornithine
  SITE 17: note = Lysine is chemically modified through conjugation of the side chain with epsilon-Lysine-epsilon-Lysine-Gamma-Glutamic acid-CO-(CH2)16-CO2H
  SITE 20: note = 2-aminoisobutyric acid
  SITE 25: note = Alpha-methyl-L-tyrosine

SEQ ID NO: 221 - protein, 40 aa, synthetic construct; identical to SEQ ID NO: 34
  SITE 2: note = 2-aminoisobutyric acid
  SITE 6: note = (S)-2-amino-3-(2-fluorophenyl)-2-methylpropanoic acid
  SITE 10: note = 3-(4-pyridyl)-L-alanine
  SITE 11: note = 2-aminoisobutyric acid
  SITE 13: note = Alpha-methyl-L-leucine
  SITE 16: note = Ornithine
  SITE 17: note = Lysine is chemically modified through conjugation of the side chain with epsilon-Lysine-epsilon-Lysine-Gamma-Glutamic acid-CO-(CH2)16-CO2H
  SITE 20: note = 2-aminoisobutyric acid
  SITE 25: note = Alpha-methyl-L-tyrosine
  SITE 34: note = 2-aminoisobutyric acid
  SITE 35: note = Ornithine
  SITE 39: note = Ornithine

SEQ ID NO: 222 - protein, 40 aa, synthetic construct; identical to SEQ ID NO: 35
  SITE 2: note = 2-aminoisobutyric acid
  SITE 6: note = (S)-2-amino-3-(2-fluorophenyl)-2-methylpropanoic acid
  SITE 10: note = 3-(4-pyridyl)-L-alanine
  SITE 11: note = 2-aminoisobutyric acid
  SITE 13: note = Alpha-methyl-L-leucine
  SITE 16: note = Ornithine
  SITE 17: note = Lysine is chemically modified through conjugation of the side chain with epsilon-Lysine-epsilon-Lysine-Gamma-Glutamic acid-CO-(CH2)16-CO2H
  SITE 20: note = 2-aminoisobutyric acid
  SITE 25: note = Alpha-methyl-L-tyrosine

SEQ ID NO: 223 - protein, 41 aa, synthetic construct; identical to SEQ ID NO: 36
  SITE 2: note = 2-aminoisobutyric acid
  SITE 6: note = (S)-2-amino-3-(2-fluorophenyl)-2-methylpropanoic acid
  SITE 10: note = 3-(4-pyridyl)-L-alanine
  SITE 11: note = 2-aminoisobutyric acid
  SITE 13: note = Alpha-methyl-L-leucine
  SITE 16: note = Ornithine
  SITE 17: note = Lysine is chemically modified through conjugation of the side chain with epsilon-Lysine-epsilon-Lysine-Gamma-Glutamic acid-CO-(CH2)16-CO2H
  SITE 20: note = 2-aminoisobutyric acid
  SITE 25: note = Alpha-methyl-L-tyrosine

SEQ ID NO: 224 - protein, 41 aa, synthetic construct; identical to SEQ ID NO: 37
  SITE 2: note = 2-aminoisobutyric acid
  SITE 6: note = (S)-2-amino-3-(2-fluorophenyl)-2-methylpropanoic acid
  SITE 10: note = 3-(4-pyridyl)-L-alanine
  SITE 11: note = 2-aminoisobutyric acid
  SITE 13: note = Alpha-methyl-L-leucine
  SITE 16: note = Ornithine
  SITE 17: note = Lysine is chemically modified through conjugation of the side chain with epsilon-Lysine-epsilon-Lysine-Gamma-Glutamic acid-CO-(CH2)16-CO2H
  SITE 20: note = 2-aminoisobutyric acid
  SITE 25: note = Alpha-methyl-L-tyrosine

SEQ ID NO: 225 - protein, 41 aa, synthetic construct; identical to SEQ ID NO: 38
  SITE 2: note = 2-aminoisobutyric acid
  SITE 6: note = (S)-2-amino-3-(2-fluorophenyl)-2-methylpropanoic acid
  SITE 10: note = 3-(4-pyridyl)-L-alanine
  SITE 11: note = 2-aminoisobutyric acid
  SITE 13: note = Alpha-methyl-L-leucine
  SITE 16: note = Ornithine
  SITE 17: note = Lysine is chemically modified through conjugation of the side chain with epsilon-Lysine-epsilon-Lysine-Gamma-Glutamic acid-CO-(CH2)16-CO2H
  SITE 20: note = 2-aminoisobutyric acid
  SITE 25: note = Alpha-methyl-L-tyrosine
  SITE 31: note = Ornithine

SEQ ID NO: 226 - protein, 41 aa, synthetic construct; identical to SEQ ID NO: 39
  SITE 2: note = 2-aminoisobutyric acid
  SITE 6: note = (S)-2-amino-3-(2-fluorophenyl)-2-methylpropanoic acid
  SITE 10: note = 3-(4-pyridyl)-L-alanine
  SITE 11: note = 2-aminoisobutyric acid
  SITE 13: note = Alpha-methyl-L-leucine
  SITE 16: note = Ornithine
  SITE 17: note = Lysine is chemically modified through conjugation of the side chain with epsilon-Lysine-epsilon-Lysine-Gamma-Glutamic acid-CO-(CH2)16-CO2H
  SITE 20: note = 2-aminoisobutyric acid
  SITE 25: note = Alpha-methyl-L-tyrosine

SEQ ID NO: 227 - protein, 41 aa, synthetic construct; identical to SEQ ID NO: 40
  SITE 2: note = 2-aminoisobutyric acid
  SITE 6: note = (S)-2-amino-3-(2-fluorophenyl)-2-methylpropanoic acid
  SITE 10: note = 3-(4-pyridyl)-L-alanine
  SITE 11: note = 2-aminoisobutyric acid
  SITE 13: note = Alpha-methyl-L-leucine
  SITE 16: note = Ornithine
  SITE 17: note = Lysine is chemically modified through conjugation of the side chain with epsilon-Lysine-epsilon-Lysine-Gamma-Glutamic acid-CO-(CH2)16-CO2H
  SITE 20: note = 2-aminoisobutyric acid
  SITE 25: note = Alpha-methyl-L-tyrosine
  SITE 34: note = 2-aminoisobutyric acid
  SITE 35: note = Ornithine
  SITE 39: note = Ornithine

SEQ ID NO: 228 - protein, 41 aa, synthetic construct; identical to SEQ ID NO: 41
  SITE 2: note = 2-aminoisobutyric acid
  SITE 6: note = (S)-2-amino-3-(2-fluorophenyl)-2-methylpropanoic acid
  SITE 10: note = 3-(4-pyridyl)-L-alanine
  SITE 11: note = 2-aminoisobutyric acid
  SITE 13: note = Alpha-methyl-L-leucine
  SITE 16: note = Ornithine
  SITE 17: note = Lysine is chemically modified through conjugation of the side chain with epsilon-Lysine-epsilon-Lysine-Gamma-Glutamic acid-CO-(CH2)16-CO2H
  SITE 20: note = 2-aminoisobutyric acid
  SITE 25: note = Alpha-methyl-L-tyrosine

SEQ ID NO: 229 - protein, 31 aa, synthetic construct; identical to SEQ ID NO: 22
  SITE 2: note = 2-aminoisobutyric acid
  SITE 6: note = (S)-2-amino-3-(2-fluorophenyl)-2-methylpropanoic acid
  SITE 10: note = 3-(4-pyridyl)-L-alanine
  SITE 11: note = 2-aminoisobutyric acid
  SITE 13: note = Alpha-methyl-L-leucine
  SITE 16: note = Ornithine
  SITE 17: note = Lysine is chemically modified through conjugation of the side chain with epsilon-Lysine-epsilon-Lysine-Gamma-Glutamic acid-CO-(CH2)16-CO2H
  SITE 20: note = 2-aminoisobutyric acid
  SITE 25: note = Alpha-methyl-L-tyrosine

SEQ ID NO: 230 - protein, 34 aa, synthetic construct; identical to SEQ ID NO: 42
  SITE 2: note = 2-aminoisobutyric acid
  SITE 6: note = (S)-2-amino-3-(2-fluorophenyl)-2-methylpropanoic acid
  SITE 10: note = 3-(4-pyridyl)-L-alanine
  SITE 11: note = 2-aminoisobutyric acid
  SITE 13: note = Alpha-methyl-L-leucine
  SITE 16: note = Ornithine
  SITE 17: note = Lysine is chemically modified through conjugation of the side chain with epsilon-Lysine-epsilon-Lysine-Gamma-Glutamic acid-CO-(CH2)16-CO2H
  SITE 20: note = 2-aminoisobutyric acid
  SITE 25: note = Alpha-methyl-L-tyrosine

SEQ ID NO: 231 - protein, 31 aa, synthetic construct; identical to SEQ ID NO: 43
  SITE 2: note = 2-aminoisobutyric acid
  SITE 6: note = (S)-2-amino-3-(2-fluorophenyl)-2-methylpropanoic acid
  SITE 10: note = 3-(4-pyridyl)-L-alanine
  SITE 11: note = 2-aminoisobutyric acid
  SITE 13: note = Alpha-methyl-L-leucine
  SITE 16: note = Ornithine
  SITE 17: note = Lysine is chemically modified through conjugation of the side chain with epsilon-Lysine-epsilon-Lysine-Gamma-Glutamic acid-CO-(CH2)16-CO2H
  SITE 20: note = 2-aminoisobutyric acid
  SITE 25: note = Alpha-methyl-L-tyrosine

SEQ ID NO: 232 - protein, 34 aa, synthetic construct; identical to SEQ ID NO: 44
  SITE 2: note = 2-aminoisobutyric acid
  SITE 6: note = (S)-2-amino-3-(2-fluorophenyl)-2-methylpropanoic acid
  SITE 10: note = 3-(4-pyridyl)-L-alanine
  SITE 11: note = 2-aminoisobutyric acid
  SITE 13: note = Alpha-methyl-L-leucine
  SITE 16: note = Ornithine
  SITE 17: note = Lysine is chemically modified through conjugation of the side chain with epsilon-Lysine-epsilon-Lysine-Gamma-Glutamic acid-CO-(CH2)16-CO2H
  SITE 20: note = 2-aminoisobutyric acid
  SITE 25: note = Alpha-methyl-L-tyrosine

SEQ ID NO: 233 - protein, 31 aa, synthetic construct; identical to SEQ ID NO: 45
  SITE 2: note = 2-aminoisobutyric acid
  SITE 6: note = (S)-2-amino-3-(2-fluorophenyl)-2-methylpropanoic acid
  SITE 10: note = 3-(4-pyridyl)-L-alanine
  SITE 11: note = 2-aminoisobutyric acid
  SITE 13: note = Alpha-methyl-L-leucine
  SITE 16: note = Ornithine
  SITE 17: note = Lysine is chemically modified through conjugation of the side chain with epsilon-Lysine-epsilon-Lysine-Gamma-Glutamic acid-CO-(CH2)16-CO2H
  SITE 20: note = 2-aminoisobutyric acid
  SITE 25: note = Alpha-methyl-L-tyrosine

SEQ ID NO: 234 - protein, 34 aa, synthetic construct; identical to SEQ ID NO: 46
  SITE 2: note = 2-aminoisobutyric acid
  SITE 6: note = (S)-2-amino-3-(2-fluorophenyl)-2-methylpropanoic acid
  SITE 10: note = 3-(4-pyridyl)-L-alanine
  SITE 11: note = 2-aminoisobutyric acid
  SITE 13: note = Alpha-methyl-L-leucine
  SITE 16: note = Ornithine
  SITE 17: note = Lysine is chemically modified through conjugation of the side chain with epsilon-Lysine-epsilon-Lysine-Gamma-Glutamic acid-CO-(CH2)16-CO2H
  SITE 20: note = 2-aminoisobutyric acid
  SITE 25: note = Alpha-methyl-L-tyrosine

SEQ ID NO: 235 - protein, 31 aa, synthetic construct; identical to SEQ ID NO: 43
  SITE 2: note = 2-aminoisobutyric acid
  SITE 6: note = (S)-2-amino-3-(2-fluorophenyl)-2-methylpropanoic acid
  SITE 10: note = 3-(4-pyridyl)-L-alanine
  SITE 11: note = 2-aminoisobutyric acid
  SITE 13: note = Alpha-methyl-L-leucine
  SITE 16: note = Ornithine
  SITE 17: note = Lysine is chemically modified through conjugation of the side chain with (2-[2-(2-amino-ethoxy)-ethoxy]-acetyl)2-Gamma-Glutamic acid-CO-(CH2)16-CO2H
  SITE 20: note = 2-aminoisobutyric acid
  SITE 25: note = Alpha-methyl-L-tyrosine

SEQ ID NO: 236 - protein, 34 aa, synthetic construct; identical to SEQ ID NO: 44
  SITE 2: note = 2-aminoisobutyric acid
  SITE 6: note = (S)-2-amino-3-(2-fluorophenyl)-2-methylpropanoic acid
  SITE 10: note = 3-(4-pyridyl)-L-alanine
  SITE 11: note = 2-aminoisobutyric acid
  SITE 13: note = Alpha-methyl-L-leucine
  SITE 16: note = Ornithine
  SITE 17: note = Lysine is chemically modified through conjugation of the side chain with (2-[2-(2-amino-ethoxy)-ethoxy]-acetyl)2-Gamma-Glutamic acid-CO-(CH2)16-CO2H
  SITE 20: note = 2-aminoisobutyric acid
  SITE 25: note = Alpha-methyl-L-tyrosine

SEQ ID NO: 237 - protein, 31 aa, synthetic construct; identical to SEQ ID NO: 45
  SITE 2: note = 2-aminoisobutyric acid
  SITE 6: note = (S)-2-amino-3-(2-fluorophenyl)-2-methylpropanoic acid
  SITE 10: note = 3-(4-pyridyl)-L-alanine
  SITE 11: note = 2-aminoisobutyric acid
  SITE 13: note = Alpha-methyl-L-leucine
  SITE 16: note = Ornithine
  SITE 17: note = Lysine is chemically modified through conjugation of the side chain with (2-[2-(2-amino-ethoxy)-ethoxy]-acetyl)2-Gamma-Glutamic acid-CO-(CH2)16-CO2H
  SITE 20: note = 2-aminoisobutyric acid
  SITE 25: note = Alpha-methyl-L-tyrosine

SEQ ID NO: 238 - protein, 34 aa, synthetic construct; identical to SEQ ID NO: 46
  SITE 2: note = 2-aminoisobutyric acid
  SITE 6: note = (S)-2-amino-3-(2-fluorophenyl)-2-methylpropanoic acid
  SITE 10: note = 3-(4-pyridyl)-L-alanine
  SITE 11: note = 2-aminoisobutyric acid
  SITE 13: note = Alpha-methyl-L-leucine
  SITE 16: note = Ornithine
  SITE 17: note = Lysine is chemically modified through conjugation of the side chain with (2-[2-(2-amino-ethoxy)-ethoxy]-acetyl)2-Gamma-Glutamic acid-CO-(CH2)16-CO2H
  SITE 20: note = 2-aminoisobutyric acid
  SITE 25: note = Alpha-methyl-L-tyrosine

SEQ ID NO: 239 - protein, 34 aa, synthetic construct; identical to SEQ ID NO: 42
  SITE 2: note = 2-aminoisobutyric acid
  SITE 6: note = (S)-2-amino-3-(2-fluorophenyl)-2-methylpropanoic acid
  SITE 10: note = 3-(4-pyridyl)-L-alanine
  SITE 11: note = 2-aminoisobutyric acid
  SITE 13: note = Alpha-methyl-L-leucine
  SITE 16: note = Ornithine
  SITE 17: note = Lysine is chemically modified through conjugation of the side chain with (2-[2-(2-amino-ethoxy)-ethoxy]-acetyl)2-Gamma-Glutamic acid-CO-(CH2)16-CO2H
  SITE 20: note = 2-aminoisobutyric acid
  SITE 25: note = Alpha-methyl-L-tyrosine

SEQ ID NO: 240 - protein, 39 aa, synthetic construct; identical to SEQ ID NO: 47
  SITE 2: note = 2-aminoisobutyric acid
  SITE 6: note = (S)-2-amino-3-(2-fluorophenyl)-2-methylpropanoic acid
  SITE 10: note = 3-(4-pyridyl)-L-alanine
  SITE 11: note = 2-aminoisobutyric acid
  SITE 13: note = Alpha-methyl-L-leucine
  SITE 16: note = Ornithine
  SITE 17: note = Lysine is chemically modified through conjugation of the side chain with (2-[2-(2-amino-ethoxy)-ethoxy]-acetyl)2-Gamma-Glutamic acid-CO-(CH2)16-CO2H
  SITE 20: note = 2-aminoisobutyric acid
  SITE 25: note = Alpha-methyl-L-tyrosine

SEQ ID NO: 241 - protein, 39 aa, synthetic construct; identical to SEQ ID NO: 47
  SITE 2: note = 2-aminoisobutyric acid
  SITE 6: note = (S)-2-amino-3-(2-fluorophenyl)-2-methylpropanoic acid
  SITE 10: note = 3-(4-pyridyl)-L-alanine
  SITE 11: note = 2-aminoisobutyric acid
  SITE 13: note = Alpha-methyl-L-leucine
  SITE 16: note = Ornithine
  SITE 17: note = Lysine is chemically modified through conjugation of the side chain with epsilon-Lysine-epsilon-Lysine-Gamma-Glutamic acid-CO-(CH2)16-CO2H
  SITE 20: note = 2-aminoisobutyric acid
  SITE 25: note = Alpha-methyl-L-tyrosine

SEQ ID NO: 242 - protein, 39 aa, synthetic construct; identical to SEQ ID NO: 5
  SITE 2: note = 2-aminoisobutyric acid
  SITE 6: note = (S)-2-amino-3-(2-fluorophenyl)-2-methylpropanoic acid
  SITE 10: note = 3-(4-pyridyl)-L-alanine
  SITE 11: note = 2-aminoisobutyric acid
  SITE 13: note = Alpha-methyl-L-leucine
  SITE 17: note = Lysine is chemically modified through conjugation of the side chain with epsilon-Lysine-epsilon-Lysine-Gamma-Glutamic acid-CO-(CH2)16-CO2H
  SITE 20: note = 2-aminoisobutyric acid
  SITE 25: note = Alpha-methyl-L-tyrosine

SEQ ID NO: 243 - protein, 39 aa, synthetic construct; identical to SEQ ID NO: 48
  SITE 2: note = 2-aminoisobutyric acid
  SITE 6: note = (S)-2-amino-3-(2-fluorophenyl)-2-methylpropanoic acid
  SITE 10: note = 3-(4-pyridyl)-L-alanine
  SITE 11: note = 2-aminoisobutyric acid
  SITE 13: note = Alpha-methyl-L-leucine
  SITE 16: note = Ornithine
  SITE 17: note = Lysine is chemically modified through conjugation of the side chain with (2-[2-(2-amino-ethoxy)-ethoxy]-acetyl)2-Gamma-Glutamic acid-CO-(CH2)16-CO2H
  SITE 20: note = 2-aminoisobutyric acid
  SITE 25: note = Alpha-methyl-L-tyrosine

SEQ ID NO: 244 - protein, 39 aa, synthetic construct; identical to SEQ ID NO: 48
  SITE 2: note = 2-aminoisobutyric acid
  SITE 6: note = (S)-2-amino-3-(2-fluorophenyl)-2-methylpropanoic acid
  SITE 10: note = 3-(4-pyridyl)-L-alanine
  SITE 11: note = 2-aminoisobutyric acid
  SITE 13: note = Alpha-methyl-L-leucine
  SITE 16: note = Ornithine
  SITE 17: note = Lysine is chemically modified through conjugation of the side chain with epsilon-Lysine-epsilon-Lysine-Gamma-Glutamic acid-CO-(CH2)16-CO2H
  SITE 20: note = 2-aminoisobutyric acid
  SITE 25: note = Alpha-methyl-L-tyrosine

SEQ ID NO: 245 - protein, 39 aa, synthetic construct; identical to SEQ ID NO: 49
  SITE 2: note = 2-aminoisobutyric acid
  SITE 6: note = (S)-2-amino-3-(2-fluorophenyl)-2-methylpropanoic acid
  SITE 10: note = 3-(4-pyridyl)-L-alanine
  SITE 11: note = 2-aminoisobutyric acid
  SITE 13: note = Alpha-methyl-L-leucine
  SITE 17: note = Lysine is chemically modified through conjugation of the side chain with epsilon-Lysine-epsilon-Lysine-Gamma-Glutamic acid-CO-(CH2)16-CO2H
  SITE 20: note = 2-aminoisobutyric acid
  SITE 25: note = Alpha-methyl-L-tyrosine

SEQ ID NO: 246 - protein, 39 aa, synthetic construct; identical to SEQ ID NO: 47
  SITE 2: note = 2-aminoisobutyric acid
  SITE 6: note = (S)-2-amino-3-(2-fluorophenyl)-2-methylpropanoic acid
  SITE 10: note = 3-(4-pyridyl)-L-alanine
  SITE 11: note = 2-aminoisobutyric acid
  SITE 13: note = Alpha-methyl-L-leucine
  SITE 16: note = Ornithine
  SITE 17: note = Lysine is chemically modified through conjugation of the side chain with epsilon-Lysine-epsilon-Lysine-Gamma-Glutamic acid-CO-(CH2)16-CO2H
  SITE 20: note = 2-aminoisobutyric acid
  SITE 24: note = D-Glutamic acid
  SITE 25: note = Alpha-methyl-L-tyrosine

SEQ ID NO: 247 - protein, 31 aa, synthetic construct; identical to SEQ ID NO: 22
  SITE 2: note = 2-aminoisobutyric acid
  SITE 6: note = (S)-2-amino-3-(2-fluorophenyl)-2-methylpropanoic acid
  SITE 10: note = 3-(4-pyridyl)-L-alanine
  SITE 11: note = 2-aminoisobutyric acid
  SITE 13: note = Alpha-methyl-L-leucine
  SITE 16: note = Ornithine
  SITE 17: note = Lysine is chemically modified through conjugation of the side chain with epsilon-Lysine-epsilon-Lysine-Gamma-Glutamic acid-CO-(CH2)16-CO2H
  SITE 20: note = 2-aminoisobutyric acid
  SITE 24: note = D-Glutamic acid
  SITE 25: note = Alpha-methyl-L-tyrosine

SEQ ID NO: 248 - protein, 39 aa, synthetic construct; identical to SEQ ID NO: 51
  SITE 2: note = 2-aminoisobutyric acid
  SITE 6: note = (S)-2-amino-3-(2-fluorophenyl)-2-methylpropanoic acid
  SITE 10: note = 3-(4-pyridyl)-L-alanine
  SITE 11: note = 2-aminoisobutyric acid
  SITE 13: note = Alpha-methyl-L-leucine
  SITE 16: note = Ornithine
  SITE 17: note = Lysine is chemically modified through conjugation of the side chain with epsilon-Lysine-epsilon-Lysine-Gamma-Glutamic acid-CO-(CH2)16-CO2H
  SITE 20: note = 2-aminoisobutyric acid
  SITE 25: note = Alpha-methyl-L-tyrosine
  SITE 31: note = Ornithine

SEQ ID NO: 249 - protein, 39 aa, synthetic construct; identical to SEQ ID NO: 51
  SITE 2: note = 2-aminoisobutyric acid
  SITE 6: note = (S)-2-amino-3-(2-fluorophenyl)-2-methylpropanoic acid
  SITE 10: note = 3-(4-pyridyl)-L-alanine
  SITE 11: note = 2-aminoisobutyric acid
  SITE 13: note = Alpha-methyl-L-leucine
  SITE 16: note = Ornithine
  SITE 17: note = Lysine is chemically modified through conjugation of the side chain with (2-[2-(2-amino-ethoxy)-ethoxy]-acetyl)2-Gamma-Glutamic acid-CO-(CH2)16-CO2H
  SITE 20: note = 2-aminoisobutyric acid
  SITE 25: note = Alpha-methyl-L-tyrosine
  SITE 31: note = Ornithine

SEQ ID NO: 250 - protein, 31 aa, synthetic construct; identical to SEQ ID NO: 52
  SITE 2: note = 2-aminoisobutyric acid
  SITE 6: note = (S)-2-amino-3-(2-fluorophenyl)-2-methylpropanoic acid
  SITE 10: note = 3-(4-pyridyl)-L-alanine
  SITE 11: note = 2-aminoisobutyric acid
  SITE 13: note = Alpha-methyl-L-leucine
  SITE 16: note = Ornithine
  SITE 17: note = Lysine is chemically modified through conjugation of the side chain with epsilon-Lysine-epsilon-Lysine-Gamma-Glutamic acid-CO-(CH2)16-CO2H
  SITE 20: note = 2-aminoisobutyric acid
  SITE 25: note = Alpha-methyl-L-tyrosine
  SITE 31: note = Ornithine

SEQ ID NO: 251 - protein, 31 aa, synthetic construct; identical to SEQ ID NO: 52
  SITE 2: note = 2-aminoisobutyric acid
  SITE 6: note = (S)-2-amino-3-(2-fluorophenyl)-2-methylpropanoic acid
  SITE 10: note = 3-(4-pyridyl)-L-alanine
  SITE 11: note = 2-aminoisobutyric acid
  SITE 13: note = Alpha-methyl-L-leucine
  SITE 16: note = Ornithine
  SITE 17: note = Lysine is chemically modified through conjugation of the side chain with (2-[2-(2-amino-ethoxy)-ethoxy]-acetyl)2-Gamma-Glutamic acid-CO-(CH2)16-CO2H
  SITE 20: note = 2-aminoisobutyric acid
  SITE 25: note = Alpha-methyl-L-tyrosine
  SITE 31: note = Ornithine

SEQ ID NO: 252 - protein, 39 aa, synthetic construct; identical to SEQ ID NO: 53
  SITE 2: note = 2-aminoisobutyric acid
  SITE 6: note = (S)-2-amino-3-(2-fluorophenyl)-2-methylpropanoic acid
  SITE 10: note = 3-(4-pyridyl)-L-alanine
  SITE 11: note = 2-aminoisobutyric acid
  SITE 13: note = Alpha-methyl-L-leucine
  SITE 16: note = Ornithine
  SITE 17: note = Lysine is chemically modified through conjugation of the side chain with epsilon-Lysine-epsilon-Lysine-Gamma-Glutamic acid-CO-(CH2)16-CO2H
  SITE 20: note = 2-aminoisobutyric acid
  SITE 21: note = Ornithine
  SITE 25: note = Alpha-methyl-L-tyrosine

SEQ ID NO: 253 - protein, 39 aa, synthetic construct; identical to SEQ ID NO: 53
  SITE 2: note = 2-aminoisobutyric acid
  SITE 6: note = (S)-2-amino-3-(2-fluorophenyl)-2-methylpropanoic acid
  SITE 10: note = 3-(4-pyridyl)-L-alanine
  SITE 11: note = 2-aminoisobutyric acid
  SITE 13: note = Alpha-methyl-L-leucine
  SITE 16: note = Ornithine
  SITE 17: note = Lysine is chemically modified through conjugation of the side chain with (2-[2-(2-amino-ethoxy)-ethoxy]-acetyl)2-Gamma-Glutamic acid-CO-(CH2)16-CO2H
  SITE 20: note = 2-aminoisobutyric acid
  SITE 21: note = Ornithine
  SITE 25: note = Alpha-methyl-L-tyrosine

SEQ ID NO: 254 - protein, 39 aa, synthetic construct; identical to SEQ ID NO: 54
  SITE 2: note = 2-aminoisobutyric acid
  SITE 6: note = (S)-2-amino-3-(2-fluorophenyl)-2-methylpropanoic acid
  SITE 10: note = 3-(4-pyridyl)-L-alanine
  SITE 11: note = 2-aminoisobutyric acid
  SITE 13: note = Alpha-methyl-L-leucine
  SITE 16: note = Ornithine
  SITE 17: note = Lysine is chemically modified through conjugation of the side chain with (2-[2-(2-amino-ethoxy)-ethoxy]-acetyl)2-Gamma-Glutamic acid-CO-(CH2)16-CO2H
  SITE 20: note = 2-aminoisobutyric acid
  SITE 25: note = Alpha-methyl-L-tyrosine

SEQ ID NO: 255 - protein, 39 aa, synthetic construct; identical to SEQ ID NO: 54
  SITE 2: note = 2-aminoisobutyric acid
  SITE 6: note = (S)-2-amino-3-(2-fluorophenyl)-2-methylpropanoic acid
  SITE 10: note = 3-(4-pyridyl)-L-alanine
  SITE 11: note = 2-aminoisobutyric acid
  SITE 13: note = Alpha-methyl-L-leucine
  SITE 16: note = Ornithine
  SITE 17: note = Lysine is chemically modified through conjugation of the side chain with epsilon-Lysine-epsilon-Lysine-Gamma-Glutamic acid-CO-(CH2)16-CO2H
  SITE 20: note = 2-aminoisobutyric acid
  SITE 25: note = Alpha-methyl-L-tyrosine

SEQ ID NO: 256 - protein, 39 aa, synthetic construct; identical to SEQ ID NO: 2
  SITE 2: note = 2-aminoisobutyric acid
  SITE 6: note = (S)-2-amino-3-(2-fluorophenyl)-2-methylpropanoic acid
  SITE 10: note = 3-(4-pyridyl)-L-alanine
  SITE 13: note = Alpha-methyl-L-leucine
  SITE 16: note = Ornithine
  SITE 17: note = Lysine is chemically modified through conjugation of the side chain with (2-[2-(2-amino-ethoxy)-ethoxy]-acetyl)2-Gamma-Glutamic acid-CO-(CH2)16-CO2H
  SITE 20: note = 2-aminoisobutyric acid
  SITE 25: note = Alpha-methyl-L-tyrosine

SEQ ID NO: 257 - protein, 39 aa, synthetic construct; identical to SEQ ID NO: 2
  SITE 2: note = 2-aminoisobutyric acid
  SITE 6: note = (S)-2-amino-3-(2-fluorophenyl)-2-methylpropanoic acid
  SITE 10: note = 3-(4-pyridyl)-L-alanine
  SITE 13: note = Alpha-methyl-L-leucine
  SITE 16: note = Ornithine
  SITE 17: note = Lysine is chemically modified through conjugation of the side chain with epsilon-Lysine-epsilon-Lysine-Gamma-Glutamic acid-CO-(CH2)16-CO2H
  SITE 20: note = 2-aminoisobutyric acid
  SITE 25: note = Alpha-methyl-L-tyrosine

SEQ ID NO: 258 - protein, 39 aa, synthetic construct; identical to SEQ ID NO: 2
  SITE 2: note = 2-aminoisobutyric acid
  SITE 6: note = (S)-2-amino-3-(2-fluorophenyl)-2-methylpropanoic acid
  SITE 10: note = 3-(4-pyridyl)-L-alanine
  SITE 13: note = Alpha-methyl-L-leucine
  SITE 16: note = Ornithine
  SITE 17: note = Lysine is chemically modified through conjugation of the side chain with epsilon-Lysine-epsilon-Lysine-Gamma-Glutamic acid-CO-(CH2)16-CO2H
  SITE 20: note = 2-aminoisobutyric acid
  SITE 24: note = D-Glutamic acid
  SITE 25: note = Alpha-methyl-L-tyrosine

SEQ ID NO: 259 - protein, 39 aa, synthetic construct; identical to SEQ ID NO: 56
  SITE 2: note = 2-aminoisobutyric acid
  SITE 6: note = (S)-2-amino-3-(2-fluorophenyl)-2-methylpropanoic acid
  SITE 10: note = 3-(4-pyridyl)-L-alanine
  SITE 11: note = 2-aminoisobutyric acid
  SITE 13: note = Alpha-methyl-L-leucine
  SITE 16: note = Ornithine
  SITE 17: note = Lysine is chemically modified through conjugation of the side chain with (2-[2-(2-amino-ethoxy)-ethoxy]-acetyl)2-Gamma-Glutamic acid-CO-(CH2)16-CO2H
  SITE 20: note = 2-aminoisobutyric acid
  SITE 25: note = Alpha-methyl-L-tyrosine
  SITE 29: note = 2-aminoisobutyric acid

SEQ ID NO: 260 - protein, 39 aa, synthetic construct; identical to SEQ ID NO: 56
  SITE 2: note = 2-aminoisobutyric acid
  SITE 6: note = (S)-2-amino-3-(2-fluorophenyl)-2-methylpropanoic acid
  SITE 10: note = 3-(4-pyridyl)-L-alanine
  SITE 11: note = 2-aminoisobutyric acid
  SITE 13: note = Alpha-methyl-L-leucine
  SITE 16: note = Ornithine
  SITE 17: note = Lysine is chemically modified through conjugation of the side chain with epsilon-Lysine-epsilon-Lysine-Gamma-Glutamic acid-CO-(CH2)16-CO2H
  SITE 20: note = 2-aminoisobutyric acid
  SITE 25: note = Alpha-methyl-L-tyrosine
  SITE 29: note = 2-aminoisobutyric acid

SEQ ID NO: 261 - protein, 39 aa, synthetic construct; identical to SEQ ID NO: 56
  SITE 2: note = 2-aminoisobutyric acid
  SITE 6: note = (S)-2-amino-3-(2-fluorophenyl)-2-methylpropanoic acid
  SITE 10: note = 3-(4-pyridyl)-L-alanine
  SITE 11: note = 2-aminoisobutyric acid
  SITE 13: note = Alpha-methyl-L-leucine
  SITE 16: note = Ornithine
  SITE 17: note = Lysine is chemically modified through conjugation of the side chain with epsilon-Lysine-epsilon-Lysine-Gamma-Glutamic acid-CO-(CH2)16-CO2H
  SITE 20: note = 2-aminoisobutyric acid
  SITE 24: note = D-Glutamic acid
  SITE 25: note = Alpha-methyl-L-tyrosine
  SITE 29: note = 2-aminoisobutyric acid

SEQ ID NO: 262 - protein, 39 aa, synthetic construct; identical to SEQ ID NO: 58
  SITE 2: note = 2-aminoisobutyric acid
  SITE 6: note = (S)-2-amino-3-(2-fluorophenyl)-2-methylpropanoic acid
  SITE 10: note = 3-(4-pyridyl)-L-alanine
  SITE 13: note = Alpha-methyl-L-leucine
  SITE 16: note = Ornithine
  SITE 17: note = Lysine is chemically modified through conjugation of the side chain with (2-[2-(2-amino-ethoxy)-ethoxy]-acetyl)2-Gamma-Glutamic acid-CO-(CH2)16-CO2H
  SITE 20: note = 2-aminoisobutyric acid
  SITE 25: note = Alpha-methyl-L-tyrosine

SEQ ID NO: 263 - protein, 39 aa, synthetic construct; identical to SEQ ID NO: 58
  SITE 2: note = 2-aminoisobutyric acid
  SITE 6: note = (S)-2-amino-3-(2-fluorophenyl)-2-methylpropanoic acid
  SITE 10: note = 3-(4-pyridyl)-L-alanine
  SITE 13: note = Alpha-methyl-L-leucine
  SITE 16: note = Ornithine
  SITE 17: note = Lysine is chemically modified through conjugation of the side chain with epsilon-Lysine-epsilon-Lysine-Gamma-Glutamic acid-CO-(CH2)16-CO2H
  SITE 20: note = 2-aminoisobutyric acid
  SITE 25: note = Alpha-methyl-L-tyrosine

SEQ ID NO: 264 - protein, 39 aa, synthetic construct; identical to SEQ ID NO: 59
  SITE 2: note = 2-aminoisobutyric acid
  SITE 6: note = (S)-2-amino-3-(2-fluorophenyl)-2-methylpropanoic acid
  SITE 11: note = 2-aminoisobutyric acid
  SITE 13: note = Alpha-methyl-L-leucine
  SITE 16: note = Ornithine
  SITE 17: note = Lysine is chemically modified through conjugation of the side chain with (2-[2-(2-amino-ethoxy)-ethoxy]-acetyl)2-Gamma-Glutamic acid-CO-(CH2)16-CO2H
  SITE 20: note = 2-aminoisobutyric acid
  SITE 25: note = Alpha-methyl-L-tyrosine

SEQ ID NO: 265 - protein, 39 aa, synthetic construct; identical to SEQ ID NO: 60
  SITE 2: note = 2-aminoisobutyric acid
  SITE 6: note = (S)-2-amino-3-(2-fluorophenyl)-2-methylpropanoic acid
  SITE 11: note = 2-aminoisobutyric acid
  SITE 13: note = Alpha-methyl-L-leucine
  SITE 16: note = Ornithine
  SITE 17: note = Lysine is chemically modified through conjugation of the side chain with (2-[2-(2-amino-ethoxy)-ethoxy]-acetyl)2-Gamma-Glutamic acid-CO-(CH2)16-CO2H
  SITE 20: note = 2-aminoisobutyric acid
  SITE 25: note = Alpha-methyl-L-tyrosine

SEQ ID NO: 266 - protein, 39 aa, synthetic construct; identical to SEQ ID NO: 59
  SITE 2: note = 2-aminoisobutyric acid
  SITE 6: note = (S)-2-amino-3-(2-fluorophenyl)-2-methylpropanoic acid
  SITE 11: note = 2-aminoisobutyric acid
  SITE 13: note = Alpha-methyl-L-leucine
  SITE 16: note = Ornithine
  SITE 17: note = Lysine is chemically modified through conjugation of the side chain with epsilon-Lysine-epsilon-Lysine-Gamma-Glutamic acid-CO-(CH2)16-CO2H
  SITE 20: note = 2-aminoisobutyric acid
  SITE 24: note = D-Glutamic acid
  SITE 25: note = Alpha-methyl-L-tyrosine

SEQ ID NO: 267 - protein, 39 aa, synthetic construct; identical to SEQ ID NO: 59
  SITE 2: note = 2-aminoisobutyric acid
  SITE 6: note = (S)-2-amino-3-(2-fluorophenyl)-2-methylpropanoic acid
  SITE 11: note = 2-aminoisobutyric acid
  SITE 13: note = Alpha-methyl-L-leucine
  SITE 16: note = Ornithine
  SITE 17: note = Lysine is chemically modified through conjugation of the side chain with epsilon-Lysine-epsilon-Lysine-Gamma-Glutamic acid-CO-(CH2)16-CO2H
  SITE 20: note = 2-aminoisobutyric acid
  SITE 25: note = Alpha-methyl-L-tyrosine

SEQ ID NO: 268 - protein, 39 aa, synthetic construct; identical to SEQ ID NO: 60
  SITE 2: note = 2-aminoisobutyric acid
  SITE 6: note = (S)-2-amino-3-(2-fluorophenyl)-2-methylpropanoic acid
  SITE 11: note = 2-aminoisobutyric acid
  SITE 13: note = Alpha-methyl-L-leucine
  SITE 16: note = Ornithine
  SITE 17: note = Lysine is chemically modified through conjugation of the side chain with epsilon-Lysine-epsilon-Lysine-Gamma-Glutamic acid-CO-(CH2)16-CO2H
  SITE 20: note = 2-aminoisobutyric acid
  SITE 25: note = Alpha-methyl-L-tyrosine

SEQ ID NO: 269 - protein, 39 aa, synthetic construct; identical to SEQ ID NO: 47
  SITE 2: note = 2-aminoisobutyric acid
  SITE 6: note = (S)-2-amino-3-(2-fluorophenyl)-2-methylpropanoic acid
  SITE 10: note = 3-(4-pyridyl)-L-alanine
  SITE 11: note = 2-aminoisobutyric acid
  SITE 13: note = Alpha-methyl-L-leucine
  SITE 16: note = Ornithine
  SITE 17: note = Lysine is chemically modified through conjugation of the side chain with epsilon-Lysine-epsilon-Lysine-Gamma-Glutamic acid-CO-(CH2)16-CO2H
  SITE 20: note = Alpha-methyl-L-leucine
  SITE 25: note = Alpha-methyl-L-tyrosine

SEQ ID NO: 270 - protein, 39 aa, synthetic construct; identical to SEQ ID NO: 47
  SITE 2: note = 2-aminoisobutyric acid
  SITE 6: note = (S)-2-amino-3-(2-fluorophenyl)-2-methylpropanoic acid
  SITE 10: note = 3-(4-pyridyl)-L-alanine
  SITE 11: note = 2-aminoisobutyric acid
  SITE 13: note = Alpha-methyl-L-leucine
  SITE 16: note = Ornithine
  SITE 17: note = Lysine is chemically modified through conjugation of the side chain with epsilon-Lysine-epsilon-Lysine-Gamma-Glutamic acid-CO-(CH2)16-CO2H
  SITE 20: note = L-isovaline
  SITE 25: note = Alpha-methyl-L-tyrosine

SEQ ID NO: 271 - protein, 39 aa, synthetic construct; identical to SEQ ID NO: 54
  SITE 2: note = 2-aminoisobutyric acid
  SITE 6: note = (S)-2-amino-3-(2-fluorophenyl)-2-methylpropanoic acid
  SITE 10: note = 3-(4-pyridyl)-L-alanine
  SITE 11: note = 2-aminoisobutyric acid
  SITE 13: note = Alpha-methyl-L-leucine
  SITE 16: note = Ornithine
  SITE 17: note = Lysine is chemically modified through conjugation of the side chain with (2-[2-(2-amino-ethoxy)-ethoxy]-acetyl)2-Gamma-Glutamic acid-CO-(CH2)16-CO2H
  SITE 20: note = Alpha-methyl-L-leucine
  SITE 25: note = Alpha-methyl-L-tyrosine

SEQ ID NO: 272 - protein, 39 aa, synthetic construct; identical to SEQ ID NO: 54
  SITE 2: note = 2-aminoisobutyric acid
  SITE 6: note = (S)-2-amino-3-(2-fluorophenyl)-2-methylpropanoic acid
  SITE 10: note = 3-(4-pyridyl)-L-alanine
  SITE 11: note = 2-aminoisobutyric acid
  SITE 13: note = Alpha-methyl-L-leucine
  SITE 16: note = Ornithine
  SITE 17: note = Lysine is chemically modified through conjugation of the side chain with (2-[2-(2-amino-ethoxy)-ethoxy]-acetyl)2-Gamma-Glutamic acid-CO-(CH2)16-CO2H
  SITE 20: note = L-isovaline
  SITE 25: note = Alpha-methyl-L-tyrosine

SEQ ID NO: 273 - protein, 39 aa, synthetic construct; identical to SEQ ID NO: 54
  SITE 2: note = 2-aminoisobutyric acid
  SITE 6: note = (S)-2-amino-3-(2-fluorophenyl)-2-methylpropanoic acid
  SITE 10: note = 3-(4-pyridyl)-L-alanine
  SITE 11: note = 2-aminoisobutyric acid
  SITE 13: note = Alpha-methyl-L-leucine
  SITE 16: note = Ornithine
  SITE 17: note = Lysine is chemically modified through conjugation of the side chain with epsilon-Lysine-epsilon-Lysine-Gamma-Glutamic acid-CO-(CH2)16-CO2H
  SITE 20: note = Alpha-methyl-L-leucine
  SITE 25: note = Alpha-methyl-L-tyrosine

SEQ ID NO: 274 - protein, 39 aa, synthetic construct; identical to SEQ ID NO: 54
  SITE 2: note = 2-aminoisobutyric acid
  SITE 6: note = (S)-2-amino-3-(2-fluorophenyl)-2-methylpropanoic acid
  SITE 10: note = 3-(4-pyridyl)-L-alanine
  SITE 11: note = 2-aminoisobutyric acid
  SITE 13: note = Alpha-methyl-L-leucine
  SITE 16: note = Ornithine
  SITE 17: note = Lysine is chemically modified through conjugation of the side chain with epsilon-Lysine-epsilon-Lysine-Gamma-Glutamic acid-CO-(CH2)16-CO2H
  SITE 20: note = L-isovaline
  SITE 25: note = Alpha-methyl-L-tyrosine

SEQ ID NO: 275 - protein, 39 aa, synthetic construct; identical to SEQ ID NO: 66
  SITE 2: note = 2-aminoisobutyric acid
  SITE 6: note = (S)-2-amino-3-(2-fluorophenyl)-2-methylpropanoic acid
  SITE 10: note = 3-(4-pyridyl)-L-alanine
  SITE 11: note = 2-aminoisobutyric acid
  SITE 13: note = Alpha-methyl-L-leucine
  SITE 16: note = Ornithine
  SITE 17: note = Lysine is chemically modified through conjugation of the side chain with (2-[2-(2-amino-ethoxy)-ethoxy]-acetyl)2-Gamma-Glutamic acid-CO-(CH2)16-CO2H
  SITE 20: note = 2-aminoisobutyric acid
  SITE 25: note = Alpha-methyl-L-tyrosine

SEQ ID NO: 276 - protein, 39 aa, synthetic construct; identical to SEQ ID NO: 67
  SITE 2: note = 2-aminoisobutyric acid
  SITE 6: note = (S)-2-amino-3-(2-fluorophenyl)-2-methylpropanoic acid
  SITE 10: note = 3-(4-pyridyl)-L-alanine
  SITE 11: note = 2-aminoisobutyric acid
  SITE 13: note = Alpha-methyl-L-leucine
  SITE 16: note = Ornithine
  SITE 17: note = Lysine is chemically modified through conjugation of the side chain with epsilon-Lysine-epsilon-Lysine-Gamma-Glutamic acid-CO-(CH2)16-CO2H
  SITE 20: note = 2-aminoisobutyric acid
  SITE 25: note = Alpha-methyl-L-tyrosine

SEQ ID NO: 277 - protein, 31 aa, synthetic construct; identical to SEQ ID NO: 68
  SITE 2: note = 2-aminoisobutyric acid
  SITE 6: note = (S)-2-amino-3-(2-fluorophenyl)-2-methylpropanoic acid
  SITE 10: note = 3-(4-pyridyl)-L-alanine
  SITE 13: note = Alpha-methyl-L-leucine
  SITE 16: note = Ornithine
  SITE 17: note = Lysine is chemically modified through conjugation of the side chain with (2-[2-(2-amino-ethoxy)-ethoxy]-acetyl)2-Gamma-Glutamic acid-CO-(CH2)16-CO2H
  SITE 20: note = 2-aminoisobutyric acid
  SITE 25: note = Alpha-methyl-L-tyrosine

SEQ ID NO: 278 - protein, 31 aa, synthetic construct; identical to SEQ ID NO: 21
  SITE 2: note = 2-aminoisobutyric acid
  SITE 6: note = (S)-2-amino-3-(2-fluorophenyl)-2-methylpropanoic acid
  SITE 10: note = 3-(4-pyridyl)-L-alanine
  SITE 13: note = Alpha-methyl-L-leucine
  SITE 16: note = Ornithine
  SITE 17: note = Lysine is chemically modified through conjugation of the side chain with epsilon-Lysine-epsilon-Lysine-Gamma-Glutamic acid-CO-(CH2)16-CO2H
  SITE 20: note = 2-aminoisobutyric acid
  SITE 25: note = Alpha-methyl-L-tyrosine

SEQ ID NO: 279 - protein, 31 aa, synthetic construct; identical to SEQ ID NO: 68
  SITE 2: note = 2-aminoisobutyric acid
  SITE 6: note = (S)-2-amino-3-(2-fluorophenyl)-2-methylpropanoic acid
  SITE 10: note = 3-(4-pyridyl)-L-alanine
  SITE 13: note = Alpha-methyl-L-leucine
  SITE 16: note = Ornithine
  SITE 17: note = Lysine is chemically modified through conjugation of the side chain with epsilon-Lysine-epsilon-Lysine-Gamma-Glutamic acid-CO-(CH2)16-CO2H
  SITE 20: note = 2-aminoisobutyric acid
  SITE 25: note = Alpha-methyl-L-tyrosine

SEQ ID NO: 280 - protein, 31 aa, synthetic construct; identical to SEQ ID NO: 69
  SITE 2: note = 2-aminoisobutyric acid
  SITE 6: note = (S)-2-amino-3-(2-fluorophenyl)-2-methylpropanoic acid
  SITE 10: note = 3-(4-pyridyl)-L-alanine
  SITE 11: note = 2-aminoisobutyric acid
  SITE 13: note = Alpha-methyl-L-leucine
  SITE 16: note = Ornithine
  SITE 17: note = Lysine is chemically modified through conjugation of the side chain with (2-[2-(2-amino-ethoxy)-ethoxy]-acetyl)2-Gamma-Glutamic acid-CO-(CH2)16-CO2H
  SITE 20: note = 2-aminoisobutyric acid
  SITE 25: note = Alpha-methyl-L-tyrosine

SEQ ID NO: 281 - protein, 39 aa, synthetic construct; identical to SEQ ID NO: 70
  SITE 2: note = 2-aminoisobutyric acid
  SITE 6: note = (S)-2-amino-3-(2-fluorophenyl)-2-methylpropanoic acid
  SITE 10: note = 3-(4-pyridyl)-L-alanine
  SITE 11: note = 2-aminoisobutyric acid
  SITE 13: note = Alpha-methyl-L-leucine
  SITE 16: note = Ornithine
  SITE 17: note = Lysine is chemically modified through conjugation of the side chain with (2-[2-(2-amino-ethoxy)-ethoxy]-acetyl)2-Gamma-Glutamic acid-CO-(CH2)16-CO2H
  SITE 20: note = 2-aminoisobutyric acid
  SITE 25: note = Alpha-methyl-L-tyrosine

SEQ ID NO: 282 - protein, 39 aa, synthetic construct; identical to SEQ ID NO: 71
  SITE 2: note = 2-aminoisobutyric acid
  SITE 6: note = (S)-2-amino-3-(2-fluorophenyl)-2-methylpropanoic acid
  SITE 10: note = 3-(4-pyridyl)-L-alanine
  SITE 13: note = Alpha-methyl-L-leucine
  SITE 16: note = Ornithine
  SITE 17: note = Lysine is chemically modified through conjugation of the side chain with (2-[2-(2-amino-ethoxy)-ethoxy]-acetyl)2-Gamma-Glutamic acid-CO-(CH2)16-CO2H
  SITE 20: note = 2-aminoisobutyric acid
  SITE 25: note = Alpha-methyl-L-tyrosine

SEQ ID NO: 283 - protein, 39 aa, synthetic construct; identical to SEQ ID NO: 72
  SITE 2: note = 2-aminoisobutyric acid
  SITE 6: note = (S)-2-amino-3-(2-fluorophenyl)-2-methylpropanoic acid
  SITE 10: note = 3-(4-pyridyl)-L-alanine
  SITE 11: note = 2-aminoisobutyric acid
  SITE 13: note = Alpha-methyl-L-leucine
  SITE 16: note = Ornithine
  SITE 17: note = Lysine is chemically modified through conjugation of the side chain with (2-[2-(2-amino-ethoxy)-ethoxy]-acetyl)2-Gamma-Glutamic acid-CO-(CH2)16-CO2H
  SITE 20: note = 2-aminoisobutyric acid
  SITE 25: note = Alpha-methyl-L-tyrosine

SEQ ID NO: 284 - protein, 39 aa, synthetic construct; identical to SEQ ID NO: 54
  SITE 2: note = 2-aminoisobutyric acid
  SITE 6: note = (S)-2-amino-3-(2-fluorophenyl)-2-methylpropanoic acid
  SITE 10: note = 3-(4-pyridyl)-L-alanine
  SITE 11: note = 2-aminoisobutyric acid
  SITE 13: note = Alpha-methyl-L-leucine
  SITE 16: note = Ornithine
  SITE 17: note = Lysine is chemically modified through conjugation of the side chain with epsilon-Lysine-2-[2-(2-amino-ethoxy)-ethoxy]-acetyl-Gamma-G lutamic acid-CO-(CH2)16-CO2H
  SITE 20: note = 2-aminoisobutyric acid
  SITE 25: note = Alpha-methyl-L-tyrosine

SEQ ID NO: 285 - protein, 39 aa, synthetic construct; identical to SEQ ID NO: 54
  SITE 2: note = 2-aminoisobutyric acid
  SITE 6: note = (S)-2-amino-3-(2-fluorophenyl)-2-methylpropanoic acid
  SITE 10: note = 3-(4-pyridyl)-L-alanine
  SITE 11: note = 2-aminoisobutyric acid
  SITE 13: note = Alpha-methyl-L-leucine
  SITE 16: note = Ornithine
  SITE 17: note = Lysine is chemically modified through conjugation of the side chain with 2-[2-(2-amino-ethoxy)-ethoxy]-acetyl-epsilon-Lysine-Gamma-G lutamic acid-CO-(CH2)16-CO2H
  SITE 20: note = 2-aminoisobutyric acid
  SITE 25: note = Alpha-methyl-L-tyrosine

SEQ ID NO: 286 - protein, 39 aa, synthetic construct; identical to SEQ ID NO: 73
  SITE 2: note = 2-aminoisobutyric acid
  SITE 6: note = (S)-2-amino-3-(2-fluorophenyl)-2-methylpropanoic acid
  SITE 13: note = Alpha-methyl-L-leucine
  SITE 16: note = Ornithine
  SITE 17: note = Lysine is chemically modified through conjugation of the side chain with (2-[2-(2-amino-ethoxy)-ethoxy]-acetyl)2-Gamma-Glutamic acid-CO-(CH2)16-CO2H
  SITE 20: note = 2-aminoisobutyric acid
  SITE 25: note = Alpha-methyl-L-tyrosine

SEQ ID NO: 287 - protein, 39 aa, synthetic construct; identical to SEQ ID NO: 74
  SITE 2: note = 2-aminoisobutyric acid
  SITE 6: note = (S)-2-amino-3-(2-fluorophenyl)-2-methylpropanoic acid
  SITE 13: note = Alpha-methyl-L-leucine
  SITE 16: note = Ornithine
  SITE 17: note = Lysine is chemically modified through conjugation of the side chain with (2-[2-(2-amino-ethoxy)-ethoxy]-acetyl)2-Gamma-Glutamic acid-CO-(CH2)16-CO2H
  SITE 20: note = 2-aminoisobutyric acid
  SITE 25: note = Alpha-methyl-L-tyrosine

SEQ ID NO: 288 - protein, 39 aa, synthetic construct; identical to SEQ ID NO: 73
  SITE 2: note = 2-aminoisobutyric acid
  SITE 6: note = (S)-2-amino-3-(2-fluorophenyl)-2-methylpropanoic acid
  SITE 13: note = Alpha-methyl-L-leucine
  SITE 16: note = Ornithine
  SITE 17: note = Lysine is chemically modified through conjugation of the side chain with epsilon-Lysine-epsilon-Lysine-Gamma-Glutamic acid-CO-(CH2)16-CO2H
  SITE 20: note = 2-aminoisobutyric acid
  SITE 25: note = Alpha-methyl-L-tyrosine

SEQ ID NO: 289 - protein, 39 aa, synthetic construct; identical to SEQ ID NO: 74
  SITE 2: note = 2-aminoisobutyric acid
  SITE 6: note = (S)-2-amino-3-(2-fluorophenyl)-2-methylpropanoic acid
  SITE 13: note = Alpha-methyl-L-leucine
  SITE 16: note = Ornithine
  SITE 17: note = Lysine is chemically modified through conjugation of the side chain with epsilon-Lysine-epsilon-Lysine-Gamma-Glutamic acid-CO-(CH2)16-CO2H
  SITE 20: note = 2-aminoisobutyric acid
  SITE 25: note = Alpha-methyl-L-tyrosine

SEQ ID NO: 290 - protein, 31 aa, synthetic construct; identical to SEQ ID NO: 69
  SITE 2: note = 2-aminoisobutyric acid
  SITE 6: note = (S)-2-amino-3-(2-fluorophenyl)-2-methylpropanoic acid
  SITE 10: note = 3-(4-pyridyl)-L-alanine
  SITE 11: note = 2-aminoisobutyric acid
  SITE 13: note = Alpha-methyl-L-leucine
  SITE 16: note = Ornithine
  SITE 17: note = Lysine is chemically modified through conjugation of the side chain with epsilon-Lysine-epsilon-Lysine-Gamma-Glutamic acid-CO-(CH2)16-CO2H
  SITE 20: note = 2-aminoisobutyric acid
  SITE 25: note = Alpha-methyl-L-tyrosine

SEQ ID NO: 291 - protein, 31 aa, synthetic construct; identical to SEQ ID NO: 68
  SITE 2: note = 2-aminoisobutyric acid
  SITE 6: note = (S)-2-amino-3-(2-fluorophenyl)-2-methylpropanoic acid
  SITE 10: note = 3-(4-pyridyl)-L-alanine
  SITE 13: note = Alpha-methyl-L-leucine
  SITE 16: note = Ornithine
  SITE 17: note = Lysine is chemically modified through conjugation of the side chain with epsilon-Lysine-epsilon-Lysine-Gamma-Glutamic acid-CO-(CH2)16-CO2H
  SITE 20: note = 2-aminoisobutyric acid
  SITE 25: note = Alpha-methyl-L-tyrosine

SEQ ID NO: 292 - protein, 31 aa, synthetic construct; identical to SEQ ID NO: 75
  SITE 2: note = 2-aminoisobutyric acid
  SITE 6: note = (S)-2-amino-3-(2-fluorophenyl)-2-methylpropanoic acid
  SITE 11: note = 2-aminoisobutyric acid
  SITE 13: note = Alpha-methyl-L-leucine
  SITE 16: note = Ornithine
  SITE 17: note = Lysine is chemically modified through conjugation of the side chain with (2-[2-(2-amino-ethoxy)-ethoxy]-acetyl)2-Gamma-Glutamic acid-CO-(CH2)16-CO2H
  SITE 20: note = 2-aminoisobutyric acid
  SITE 25: note = Alpha-methyl-L-tyrosine

SEQ ID NO: 293 - protein, 31 aa, synthetic construct; identical to SEQ ID NO: 76
  SITE 2: note = 2-aminoisobutyric acid
  SITE 6: note = (S)-2-amino-3-(2-fluorophenyl)-2-methylpropanoic acid
  SITE 10: note = 3-(4-pyridyl)-L-alanine
  SITE 13: note = Alpha-methyl-L-leucine
  SITE 16: note = Ornithine
  SITE 17: note = Lysine is chemically modified through conjugation of the side chain with (2-[2-(2-amino-ethoxy)-ethoxy]-acetyl)2-Gamma-Glutamic acid-CO-(CH2)16-CO2H
  SITE 20: note = 2-aminoisobutyric acid
  SITE 25: note = Alpha-methyl-L-tyrosine

SEQ ID NO: 294 - protein, 39 aa, synthetic construct; identical to SEQ ID NO: 77
  SITE 2: note = 2-aminoisobutyric acid
  SITE 6: note = (S)-2-amino-3-(2-fluorophenyl)-2-methylpropanoic acid
  SITE 10: note = 3-(4-pyridyl)-L-alanine
  SITE 13: note = Alpha-methyl-L-leucine
  SITE 16: note = Ornithine
  SITE 17: note = Lysine is chemically modified through conjugation of the side chain with epsilon-Lysine-epsilon-Lysine-Gamma-Glutamic acid-CO-(CH2)16-CO2H
  SITE 20: note = 2-aminoisobutyric acid
  SITE 25: note = Alpha-methyl-L-tyrosine

SEQ ID NO: 295 - protein, 31 aa, synthetic construct; identical to SEQ ID NO: 78
  SITE 2: note = 2-aminoisobutyric acid
  SITE 6: note = (S)-2-amino-3-(2-fluorophenyl)-2-methylpropanoic acid
  SITE 10: note = 3-(4-pyridyl)-L-alanine
  SITE 11: note = 2-aminoisobutyric acid
  SITE 13: note = Alpha-methyl-L-leucine
  SITE 16: note = Ornithine
  SITE 17: note = Lysine is chemically modified through conjugation of the side chain with (2-[2-(2-amino-ethoxy)-ethoxy]-acetyl)2-Gamma-Glutamic acid-CO-(CH2)16-CO2H
  SITE 20: note = 2-aminoisobutyric acid
  SITE 25: note = Alpha-methyl-L-tyrosine

SEQ ID NO: 296 - protein, 39 aa, synthetic construct; identical to SEQ ID NO: 79
  SITE 2: note = 2-aminoisobutyric acid
  SITE 6: note = (S)-2-amino-3-(2-fluorophenyl)-2-methylpropanoic acid
  SITE 10: note = 3-(4-pyridyl)-L-alanine
  SITE 13: note = Alpha-methyl-L-leucine
  SITE 16: note = Ornithine
  SITE 17: note = Lysine is chemically modified through conjugation of the side chain with epsilon-Lysine-epsilon-Lysine-Gamma-Glutamic acid-CO-(CH2)16-CO2H
  SITE 20: note = 2-aminoisobutyric acid
  SITE 24: note = D-Glutamic acid
  SITE 25: note = Alpha-methyl-L-tyrosine

SEQ ID NO: 297 - protein, 39 aa, synthetic construct; identical to SEQ ID NO: 48
  SITE 2: note = 2-aminoisobutyric acid
  SITE 6: note = (S)-2-amino-3-(2-fluorophenyl)-2-methylpropanoic acid
  SITE 10: note = 3-(4-pyridyl)-L-alanine
  SITE 11: note = 2-aminoisobutyric acid
  SITE 13: note = Alpha-methyl-L-leucine
  SITE 16: note = Ornithine
  SITE 17: note = Lysine is chemically modified through conjugation of the side chain with epsilon-Lysine-epsilon-Lysine-Gamma-Glutamic acid-CO-(CH2)16-CO2H
  SITE 20: note = 2-aminoisobutyric acid
  SITE 24: note = D-Glutamic acid
  SITE 25: note = Alpha-methyl-L-tyrosine

SEQ ID NO: 298 - protein, 39 aa, synthetic construct; identical to SEQ ID NO: 81
  SITE 2: note = 2-aminoisobutyric acid
  SITE 6: note = (S)-2-amino-3-(2-fluorophenyl)-2-methylpropanoic acid
  SITE 11: note = 2-aminoisobutyric acid
  SITE 13: note = Alpha-methyl-L-leucine
  SITE 16: note = Ornithine
  SITE 17: note = Lysine is chemically modified through conjugation of the side chain with (2-[2-(2-amino-ethoxy)-ethoxy]-acetyl)2-Gamma-Glutamic acid-CO-(CH2)16-CO2H
  SITE 20: note = 2-aminoisobutyric acid
  SITE 24: note = D-Glutamic acid
  SITE 25: note = Alpha-methyl-L-tyrosine

SEQ ID NO: 299 - protein, 39 aa, synthetic construct; identical to SEQ ID NO: 81
  SITE 2: note = 2-aminoisobutyric acid
  SITE 6: note = (S)-2-amino-3-(2-fluorophenyl)-2-methylpropanoic acid
  SITE 11: note = 2-aminoisobutyric acid
  SITE 13: note = Alpha-methyl-L-leucine
  SITE 16: note = Ornithine
  SITE 17: note = Lysine is chemically modified through conjugation of the side chain with epsilon-Lysine-epsilon-Lysine-Gamma-Glutamic acid-CO-(CH2)16-CO2H
  SITE 20: note = 2-aminoisobutyric acid
  SITE 24: note = D-Glutamic acid
  SITE 25: note = Alpha-methyl-L-tyrosine

SEQ ID NO: 300 - protein, 39 aa, synthetic construct; identical to SEQ ID NO: 82
  SITE 2: note = 2-aminoisobutyric acid
  SITE 6: note = (S)-2-amino-3-(2-fluorophenyl)-2-methylpropanoic acid
  SITE 10: note = 3-(4-pyridyl)-L-alanine
  SITE 13: note = Alpha-methyl-L-leucine
  SITE 16: note = Ornithine
  SITE 17: note = Lysine is chemically modified through conjugation of the side chain with (2-[2-(2-amino-ethoxy)-ethoxy]-acetyl)2-Gamma-Glutamic acid-CO-(CH2)16-CO2H
  SITE 20: note = 2-aminoisobutyric acid
  SITE 24: note = D-Glutamic acid
  SITE 25: note = Alpha-methyl-L-tyrosine

SEQ ID NO: 301 - protein, 39 aa, synthetic construct; identical to SEQ ID NO: 82
  SITE 2: note = 2-aminoisobutyric acid
  SITE 6: note = (S)-2-amino-3-(2-fluorophenyl)-2-methylpropanoic acid
  SITE 10: note = 3-(4-pyridyl)-L-alanine
  SITE 13: note = Alpha-methyl-L-leucine
  SITE 16: note = Ornithine
  SITE 20: note = 2-aminoisobutyric acid
  SITE 24: note = D-Glutamic acid
  SITE 25: note = Alpha-methyl-L-tyrosine

SEQ ID NO: 302 - protein, 39 aa, synthetic construct; identical to SEQ ID NO: 83
  SITE 2: note = 2-aminoisobutyric acid
  SITE 6: note = (S)-2-amino-3-(2-fluorophenyl)-2-methylpropanoic acid
  SITE 10: note = 3-(4-pyridyl)-L-alanine
  SITE 11: note = 2-aminoisobutyric acid
  SITE 13: note = Alpha-methyl-L-leucine
  SITE 16: note = Ornithine
  SITE 17: note = Lysine is chemically modified through conjugation of the side chain with epsilon-Lysine-epsilon-Lysine-Gamma-Glutamic acid-CO-(CH2)16-CO2H
  SITE 20: note = 2-aminoisobutyric acid
  SITE 24: note = D-Glutamic acid
  SITE 25: note = Alpha-methyl-L-tyrosine

SEQ ID NO: 303 - protein, 39 aa, synthetic construct; identical to SEQ ID NO: 84
  SITE 2: note = 2-aminoisobutyric acid
  SITE 6: note = (S)-2-amino-3-(2-fluorophenyl)-2-methylpropanoic acid
  SITE 11: note = 2-aminoisobutyric acid
  SITE 13: note = Alpha-methyl-L-leucine
  SITE 16: note = Ornithine
  SITE 17: note = Lysine is chemically modified through conjugation of the side chain with (2-[2-(2-amino-ethoxy)-ethoxy]-acetyl)2-Gamma-Glutamic acid-CO-(CH2)16-CO2H
  SITE 20: note = 2-aminoisobutyric acid
  SITE 24: note = D-Glutamic acid
  SITE 25: note = Alpha-methyl-L-tyrosine

SEQ ID NO: 304 - protein, 39 aa, synthetic construct; identical to SEQ ID NO: 84
  SITE 2: note = 2-aminoisobutyric acid
  SITE 6: note = (S)-2-amino-3-(2-fluorophenyl)-2-methylpropanoic acid
  SITE 11: note = 2-aminoisobutyric acid
  SITE 13: note = Alpha-methyl-L-leucine
  SITE 16: note = Ornithine
  SITE 17: note = Lysine is chemically modified through conjugation of the side chain with epsilon-Lysine-epsilon-Lysine-Gamma-Glutamic acid-CO-(CH2)16-CO2H
  SITE 20: note = 2-aminoisobutyric acid
  SITE 24: note = D-Glutamic acid
  SITE 25: note = Alpha-methyl-L-tyrosine

SEQ ID NO: 305 - protein, 39 aa, synthetic construct; identical to SEQ ID NO: 85
  SITE 2: note = 2-aminoisobutyric acid
  SITE 6: note = (S)-2-amino-3-(2-fluorophenyl)-2-methylpropanoic acid
  SITE 10: note = 3-(4-pyridyl)-L-alanine
  SITE 13: note = Alpha-methyl-L-leucine
  SITE 16: note = Ornithine
  SITE 17: note = Lysine is chemically modified through conjugation of the side chain with epsilon-Lysine-epsilon-Lysine-Gamma-Glutamic acid-CO-(CH2)16-CO2H
  SITE 20: note = 2-aminoisobutyric acid
  SITE 24: note = D-Glutamic acid
  SITE 25: note = Alpha-methyl-L-tyrosine

SEQ ID NO: 306 - protein, 39 aa, synthetic construct; identical to SEQ ID NO: 85
  SITE 2: note = 2-aminoisobutyric acid
  SITE 6: note = (S)-2-amino-3-(2-fluorophenyl)-2-methylpropanoic acid
  SITE 10: note = 3-(4-pyridyl)-L-alanine
  SITE 13: note = Alpha-methyl-L-leucine
  SITE 16: note = Ornithine
  SITE 17: note = Lysine is chemically modified through conjugation of the side chain with (2-[2-(2-amino-ethoxy)-ethoxy]-acetyl)2-Gamma-Glutamic acid-CO-(CH2)16-CO2H
  SITE 20: note = 2-aminoisobutyric acid
  SITE 24: note = D-Glutamic acid
  SITE 25: note = Alpha-methyl-L-tyrosine

SEQ ID NO: 307 - protein, 39 aa, synthetic construct; identical to SEQ ID NO: 86
  SITE 2: note = 2-aminoisobutyric acid
  SITE 6: note = (S)-2-amino-3-(2-fluorophenyl)-2-methylpropanoic acid
  SITE 11: note = 2-aminoisobutyric acid
  SITE 13: note = Alpha-methyl-L-leucine
  SITE 16: note = Ornithine
  SITE 17: note = Lysine is chemically modified through conjugation of the side chain with epsilon-Lysine-epsilon-Lysine-Gamma-Glutamic acid-CO-(CH2)16-CO2H
  SITE 20: note = 2-aminoisobutyric acid
  SITE 24: note = D-Glutamic acid
  SITE 25: note = Alpha-methyl-L-tyrosine

SEQ ID NO: 308 - protein, 39 aa, synthetic construct; identical to SEQ ID NO: 86
  SITE 2: note = 2-aminoisobutyric acid
  SITE 6: note = (S)-2-amino-3-(2-fluorophenyl)-2-methylpropanoic acid
  SITE 11: note = 2-aminoisobutyric acid
  SITE 13: note = Alpha-methyl-L-leucine
  SITE 16: note = Ornithine
  SITE 17: note = Lysine is chemically modified through conjugation of the side chain with (2-[2-(2-amino-ethoxy)-ethoxy]-acetyl)2-Gamma-Glutamic acid-CO-(CH2)16-CO2H
  SITE 20: note = 2-aminoisobutyric acid
  SITE 24: note = D-Glutamic acid
  SITE 25: note = Alpha-methyl-L-tyrosine

SEQ ID NO: 309 - protein, 39 aa, synthetic construct; identical to SEQ ID NO: 2
  SITE 2: note = 2-aminoisobutyric acid
  SITE 6: note = (S)-2-amino-3-(2-fluorophenyl)-2-methylpropanoic acid
  SITE 10: note = 3-(4-pyridyl)-L-alanine
  SITE 13: note = Alpha-methyl-L-leucine
  SITE 16: note = Ornithine
  SITE 17: note = Lysine is chemically modified through conjugation of the side chain with 2-[2-(2-amino-ethoxy)-ethoxy]-acetyl-Gamma-Glutamic acid-CO-(CH2)16-CO2H
  SITE 20: note = 2-aminoisobutyric acid
  SITE 24: note = D-Glutamic acid
  SITE 25: note = Alpha-methyl-L-tyrosine

SEQ ID NO: 310 - protein, 39 aa, synthetic construct; identical to SEQ ID NO: 59
  SITE 2: note = 2-aminoisobutyric acid
  SITE 6: note = (S)-2-amino-3-(2-fluorophenyl)-2-methylpropanoic acid
  SITE 11: note = 2-aminoisobutyric acid
  SITE 13: note = Alpha-methyl-L-leucine
  SITE 16: note = Ornithine
  SITE 17: note = Lysine is chemically modified through conjugation of the side chain with 2-[2-(2-amino-ethoxy)-ethoxy]-acetyl-Gamma-Glutamic acid-CO-(CH2)16-CO2H
  SITE 20: note = 2-aminoisobutyric acid
  SITE 24: note = D-Glutamic acid
  SITE 25: note = Alpha-methyl-L-tyrosine

SEQ ID NO: 311 - protein, 39 aa, synthetic construct; identical to SEQ ID NO: 87
  SITE 2: note = 2-aminoisobutyric acid
  SITE 6: note = (S)-2-amino-3-(2-fluorophenyl)-2-methylpropanoic acid
  SITE 10: note = 3-(4-pyridyl)-L-alanine
  SITE 13: note = Alpha-methyl-L-leucine
  SITE 16: note = Ornithine
  SITE 17: note = Lysine is chemically modified through conjugation of the side chain with epsilon-Lysine-epsilon-Lysine-Gamma-Glutamic acid-CO-(CH2)16-CO2H
  SITE 20: note = 2-aminoisobutyric acid
  SITE 24: note = D-Glutamic acid
  SITE 25: note = Alpha-methyl-L-tyrosine

SEQ ID NO: 312 - protein, 39 aa, synthetic construct; identical to SEQ ID NO: 82
  SITE 2: note = 2-aminoisobutyric acid
  SITE 6: note = (S)-2-amino-3-(2-fluorophenyl)-2-methylpropanoic acid
  SITE 10: note = 3-(4-pyridyl)-L-alanine
  SITE 13: note = Alpha-methyl-L-leucine
  SITE 16: note = Ornithine
  SITE 17: note = Lysine is chemically modified through conjugation of the side chain with (2-[2-(2-amino-ethoxy)-ethoxy]-acetyl)2-Gamma-Glutamic acid-CO-(CH2)16-CO2H
  SITE 20: note = 2-aminoisobutyric acid
  SITE 25: note = Alpha-methyl-L-tyrosine

SEQ ID NO: 313 - protein, 39 aa, synthetic construct; identical to SEQ ID NO: 82
  SITE 2: note = 2-aminoisobutyric acid
  SITE 6: note = (S)-2-amino-3-(2-fluorophenyl)-2-methylpropanoic acid
  SITE 10: note = 3-(4-pyridyl)-L-alanine
  SITE 13: note = Alpha-methyl-L-leucine
  SITE 16: note = Ornithine
  SITE 17: note = Lysine is chemically modified through conjugation of the side chain with epsilon-Lysine-epsilon-Lysine-Gamma-Glutamic acid-CO-(CH2)16-CO2H
  SITE 20: note = 2-aminoisobutyric acid
  SITE 25: note = Alpha-methyl-L-tyrosine

SEQ ID NO: 314 - protein, 39 aa, synthetic construct; identical to SEQ ID NO: 84
  SITE 2: note = 2-aminoisobutyric acid
  SITE 6: note = (S)-2-amino-3-(2-fluorophenyl)-2-methylpropanoic acid
  SITE 11: note = 2-aminoisobutyric acid
  SITE 13: note = Alpha-methyl-L-leucine
  SITE 16: note = Ornithine
  SITE 17: note = Lysine is chemically modified through conjugation of the side chain with (2-[2-(2-amino-ethoxy)-ethoxy]-acetyl)2-Gamma-Glutamic acid-CO-(CH2)16-CO2H
  SITE 20: note = 2-aminoisobutyric acid
  SITE 25: note = Alpha-methyl-L-tyrosine

SEQ ID NO: 315 - protein, 39 aa, synthetic construct; identical to SEQ ID NO: 84
  SITE 2: note = 2-aminoisobutyric acid
  SITE 6: note = (S)-2-amino-3-(2-fluorophenyl)-2-methylpropanoic acid
  SITE 11: note = 2-aminoisobutyric acid
  SITE 13: note = Alpha-methyl-L-leucine
  SITE 16: note = Ornithine
  SITE 17: note = Lysine is chemically modified through conjugation of the side chain with epsilon-Lysine-epsilon-Lysine-Gamma-Glutamic acid-CO-(CH2)16-CO2H
  SITE 20: note = 2-aminoisobutyric acid
  SITE 25: note = Alpha-methyl-L-tyrosine

SEQ ID NO: 316 - protein, 39 aa, synthetic construct; identical to SEQ ID NO: 1
  SITE 2: note = 2-aminoisobutyric acid
  SITE 6: note = (S)-2-amino-3-(2-fluorophenyl)-2-methylpropanoic acid
  SITE 10: note = 3-(4-pyridyl)-L-alanine
  SITE 13: note = Alpha-methyl-L-leucine
  SITE 17: note = Acetylated Lysine
  SITE 20: note = 2-aminoisobutyric acid
  SITE 24: note = D-Glutamic acid
  SITE 25: note = Alpha-methyl-L-tyrosine

SEQ ID NO: 317 - protein, 39 aa, synthetic construct; identical to SEQ ID NO: 90
  SITE 2: note = 2-aminoisobutyric acid
  SITE 6: note = (S)-2-amino-3-(2-fluorophenyl)-2-methylpropanoic acid
  SITE 10: note = 3-(4-pyridyl)-L-alanine
  SITE 13: note = Alpha-methyl-L-leucine
  SITE 20: note = 2-aminoisobutyric acid
  SITE 24: note = D-Glutamic acid
  SITE 25: note = Alpha-methyl-L-tyrosine

SEQ ID NO: 318 - protein, 39 aa, synthetic construct; identical to SEQ ID NO: 2
  SITE 2: note = 2-aminoisobutyric acid
  SITE 6: note = (S)-2-amino-3-(2-fluorophenyl)-2-methylpropanoic acid
  SITE 10: note = 3-(4-pyridyl)-L-alanine
  SITE 13: note = Alpha-methyl-L-leucine
  SITE 16: note = Ornithine
  SITE 17: note = Lysine is chemically modified through conjugation of the side chain with (2-[2-(2-amino-ethoxy)-ethoxy]-acetyl)2-Gamma-Glutamic acid-CO-(CH2)18-CO2H
  SITE 20: note = 2-aminoisobutyric acid
  SITE 24: note = D-Glutamic acid
  SITE 25: note = Alpha-methyl-L-tyrosine

SEQ ID NO: 319 - protein, 39 aa, synthetic construct; identical to SEQ ID NO: 2
  SITE 2: note = 2-aminoisobutyric acid
  SITE 6: note = (S)-2-amino-3-(2-fluorophenyl)-2-methylpropanoic acid
  SITE 10: note = 3-(4-pyridyl)-L-alanine
  SITE 13: note = Alpha-methyl-L-leucine
  SITE 16: note = Ornithine
  SITE 17: note = Lysine is chemically modified through conjugation of the side chain with (2-[2-(2-amino-ethoxy)-ethoxy]-acetyl)2-Gamma-Glutamic acid-CO-(CH2)14-CO2H
  SITE 20: note = 2-aminoisobutyric acid
  SITE 24: note = D-Glutamic acid
  SITE 25: note = Alpha-methyl-L-tyrosine

SEQ ID NO: 320 - protein, 39 aa, synthetic construct; identical to SEQ ID NO: 1
  SITE 2: note = 2-aminoisobutyric acid
  SITE 6: note = (S)-2-amino-3-(2-fluorophenyl)-2-methylpropanoic acid
  SITE 10: note = 3-(4-pyridyl)-L-alanine
  SITE 13: note = Alpha-methyl-L-leucine
  SITE 17: note = Lysine is chemically modified through conjugation of the side chain with (2-[2-(2-amino-ethoxy)-ethoxy]-acetyl)2-Gamma-Glutamic acid-CO-(CH2)14-CO2H
  SITE 20: note = 2-aminoisobutyric acid
  SITE 24: note = D-Glutamic acid
  SITE 25: note = Alpha-methyl-L-tyrosine

SEQ ID NO: 321 - protein, 39 aa, synthetic construct; identical to SEQ ID NO: 2
  SITE 2: note = 2-aminoisobutyric acid
  SITE 6: note = (S)-2-amino-3-(2-fluorophenyl)-2-methylpropanoic acid
  SITE 10: note = 3-(4-pyridyl)-L-alanine
  SITE 13: note = Alpha-methyl-L-leucine
  SITE 16: note = Ornithine
  SITE 17: note = Lysine is chemically modified through conjugation of the side chain with epsilon-Lysine-epsilon-Lysine-Gamma-Glutamic acid-CO-(CH2)18-CO2H
  SITE 20: note = 2-aminoisobutyric acid
  SITE 24: note = D-Glutamic acid
  SITE 25: note = Alpha-methyl-L-tyrosine

SEQ ID NO: 322 - protein, 39 aa, synthetic construct; identical to SEQ ID NO: 1
  SITE 2: note = 2-aminoisobutyric acid
  SITE 6: note = (S)-2-amino-3-(2-fluorophenyl)-2-methylpropanoic acid
  SITE 10: note = 3-(4-pyridyl)-L-alanine
  SITE 13: note = Alpha-methyl-L-leucine
  SITE 17: note = Lysine is chemically modified through conjugation of the side chain with epsilon-Lysine-epsilon-Lysine-Gamma-Glutamic acid-CO-(CH2)18-CO2H
  SITE 20: note = 2-aminoisobutyric acid
  SITE 24: note = D-Glutamic acid
  SITE 25: note = Alpha-methyl-L-tyrosine

SEQ ID NO: 323 - protein, 31 aa, synthetic construct; identical to SEQ ID NO: 21
  SITE 2: note = 2-aminoisobutyric acid
  SITE 6: note = (S)-2-amino-3-(2-fluorophenyl)-2-methylpropanoic acid
  SITE 10: note = 3-(4-pyridyl)-L-alanine
  SITE 13: note = Alpha-methyl-L-leucine
  SITE 16: note = Ornithine
  SITE 17: note = Lysine is chemically modified through conjugation of the side chain with (2-[2-(2-amino-ethoxy)-ethoxy]-acetyl)2-Gamma-Glutamic acid-CO-(CH2)14-CO2H
  SITE 20: note = 2-aminoisobutyric acid
  SITE 25: note = Alpha-methyl-L-tyrosine

SEQ ID NO: 324 - protein, 39 aa, synthetic construct; identical to SEQ ID NO: 1
  SITE 2: note = 2-aminoisobutyric acid
  SITE 6: note = (S)-2-amino-3-(2-fluorophenyl)-2-methylpropanoic acid
  SITE 10: note = 3-(4-pyridyl)-L-alanine
  SITE 13: note = Alpha-methyl-L-leucine
  SITE 17: note = Lysine is chemically modified through conjugation of the side chain with Gamma-Glutamic acid-2-[2-(2-amino-ethoxy)-ethoxy]-acetyl-epsilon-Lysine-CO -(CH2)18-CO2H
  SITE 20: note = 2-aminoisobutyric acid
  SITE 24: note = D-Glutamic acid
  SITE 25: note = Alpha-methyl-L-tyrosine

SEQ ID NO: 325 - protein, 31 aa, synthetic construct; identical to SEQ ID NO: 22
  SITE 2: note = 2-aminoisobutyric acid
  SITE 6: note = (S)-2-amino-3-(2-fluorophenyl)-2-methylpropanoic acid
  SITE 10: note = 3-(4-pyridyl)-L-alanine
  SITE 11: note = 2-aminoisobutyric acid
  SITE 13: note = Alpha-methyl-L-leucine
  SITE 16: note = Ornithine
  SITE 17: note = Lysine is chemically modified through conjugation of the side chain with (2-[2-(2-amino-ethoxy)-ethoxy]-acetyl)2-Gamma-Glutamic acid-CO-(CH2)14-CO2H
  SITE 20: note = 2-aminoisobutyric acid
  SITE 25: note = Alpha-methyl-L-tyrosine

SEQ ID NO: 326 - protein, 34 aa, synthetic construct; identical to SEQ ID NO: 42
  SITE 2: note = 2-aminoisobutyric acid
  SITE 6: note = (S)-2-amino-3-(2-fluorophenyl)-2-methylpropanoic acid
  SITE 10: note = 3-(4-pyridyl)-L-alanine
  SITE 11: note = 2-aminoisobutyric acid
  SITE 13: note = Alpha-methyl-L-leucine
  SITE 16: note = Ornithine
  SITE 17: note = Lysine is chemically modified through conjugation of the side chain with (2-[2-(2-amino-ethoxy)-ethoxy]-acetyl)2-Gamma-Glutamic acid-CO-(CH2)14-CO2H
  SITE 20: note = 2-aminoisobutyric acid
  SITE 25: note = Alpha-methyl-L-tyrosine

SEQ ID NO: 327 - protein, 34 aa, synthetic construct; identical to SEQ ID NO: 91
  SITE 2: note = 2-aminoisobutyric acid
  SITE 6: note = (S)-2-amino-3-(2-fluorophenyl)-2-methylpropanoic acid
  SITE 10: note = 3-(4-pyridyl)-L-alanine
  SITE 11: note = 2-aminoisobutyric acid
  SITE 13: note = Alpha-methyl-L-leucine
  SITE 17: note = Lysine is chemically modified through conjugation of the side chain with epsilon-Lysine-epsilon-Lysine-Gamma-Glutamic acid-CO-(CH2)14-CO2H
  SITE 20: note = 2-aminoisobutyric acid
  SITE 25: note = Alpha-methyl-L-tyrosine

SEQ ID NO: 328 - protein, 31 aa, synthetic construct; identical to SEQ ID NO: 16
  SITE 2: note = 2-aminoisobutyric acid
  SITE 6: note = (S)-2-amino-3-(2-fluorophenyl)-2-methylpropanoic acid
  SITE 10: note = 3-(4-pyridyl)-L-alanine
  SITE 11: note = 2-aminoisobutyric acid
  SITE 13: note = Alpha-methyl-L-leucine
  SITE 17: note = Lysine is chemically modified through conjugation of the side chain with epsilon-Lysine-epsilon-Lysine-Gamma-Glutamic acid-CO-(CH2)14-CO2H
  SITE 20: note = 2-aminoisobutyric acid
  SITE 25: note = Alpha-methyl-L-tyrosine

SEQ ID NO: 329 - protein, 31 aa, synthetic construct; identical to SEQ ID NO: 3
  SITE 2: note = 2-aminoisobutyric acid
  SITE 6: note = (S)-2-amino-3-(2-fluorophenyl)-2-methylpropanoic acid
  SITE 10: note = 3-(4-pyridyl)-L-alanine
  SITE 13: note = Alpha-methyl-L-leucine
  SITE 17: note = Lysine is chemically modified through conjugation of the side chain with (2-[2-(2-amino-ethoxy)-ethoxy]-acetyl)2-Gamma-Glutamic acid-CO-(CH2)14-CO2H
  SITE 20: note = 2-aminoisobutyric acid
  SITE 25: note = Alpha-methyl-L-tyrosine

SEQ ID NO: 330 - protein, 39 aa, synthetic construct; identical to SEQ ID NO: 59
  SITE 2: note = 2-aminoisobutyric acid
  SITE 6: note = (S)-2-amino-3-(2-fluorophenyl)-2-methylpropanoic acid
  SITE 11: note = 2-aminoisobutyric acid
  SITE 13: note = Alpha-methyl-L-leucine
  SITE 16: note = Ornithine
  SITE 17: note = Lysine is chemically modified through conjugation of the side chain with (2-[2-(2-amino-ethoxy)-ethoxy]-acetyl)2-Gamma-Glutamic acid-CO-(CH2)16-CO2H
  SITE 20: note = 2-aminoisobutyric acid
  SITE 24: note = D-Glutamic acid
  SITE 25: note = Alpha-methyl-L-tyrosine

SEQ ID NO: 331 - protein, 39 aa, synthetic construct; identical to SEQ ID NO: 92
  SITE 2: note = 2-aminoisobutyric acid
  SITE 6: note = (S)-2-amino-3-(2-fluorophenyl)-2-methylpropanoic acid
  SITE 10: note = 3-(4-pyridyl)-L-alanine
  SITE 11: note = 2-aminoisobutyric acid
  SITE 13: note = Alpha-methyl-L-leucine
  SITE 16: note = Ornithine
  SITE 17: note = Lysine is chemically modified through conjugation of the side chain with (2-[2-(2-amino-ethoxy)-ethoxy]-acetyl)2-Gamma-Glutamic acid-CO-(CH2)16-CO2H
  SITE 20: note = 2-aminoisobutyric acid
  SITE 25: note = Alpha-methyl-L-tyrosine
  SITE 29: note = 2-aminoisobutyric acid

SEQ ID NO: 332 - protein, 39 aa, synthetic construct; identical to SEQ ID NO: 92
  SITE 2: note = 2-aminoisobutyric acid
  SITE 6: note = (S)-2-amino-3-(2-fluorophenyl)-2-methylpropanoic acid
  SITE 10: note = 3-(4-pyridyl)-L-alanine
  SITE 11: note = 2-aminoisobutyric acid
  SITE 13: note = Alpha-methyl-L-leucine
  SITE 16: note = Ornithine
  SITE 17: note = Lysine is chemically modified through conjugation of the side chain with epsilon-Lysine-epsilon-Lysine-Gamma-Glutamic acid-CO-(CH2)16-CO2H
  SITE 20: note = 2-aminoisobutyric acid
  SITE 25: note = Alpha-methyl-L-tyrosine
  SITE 29: note = 2-aminoisobutyric acid

SEQ ID NO: 333 - protein, 39 aa, synthetic construct; identical to SEQ ID NO: 93
  SITE 2: note = 2-aminoisobutyric acid
  SITE 6: note = (S)-2-amino-3-(2-fluorophenyl)-2-methylpropanoic acid
  SITE 10: note = 3-(4-pyridyl)-L-alanine
  SITE 13: note = Alpha-methyl-L-leucine
  SITE 16: note = Ornithine
  SITE 17: note = Lysine is chemically modified through conjugation of the side chain with (2-[2-(2-amino-ethoxy)-ethoxy]-acetyl)2-Gamma-Glutamic acid-CO-(CH2)16-CO2H
  SITE 20: note = Alpha-methyl-L-3-(4-pyridyl)-L-alanine
  SITE 21: note = Ornithine
  SITE 24: note = D-Glutamic acid
  SITE 25: note = Alpha-methyl-L-tyrosine

SEQ ID NO: 334 - protein, 39 aa, synthetic construct; identical to SEQ ID NO: 93
  SITE 2: note = 2-aminoisobutyric acid
  SITE 6: note = (S)-2-amino-3-(2-fluorophenyl)-2-methylpropanoic acid
  SITE 10: note = 3-(4-pyridyl)-L-alanine
  SITE 13: note = Alpha-methyl-L-leucine
  SITE 16: note = Ornithine
  SITE 17: note = Lysine is chemically modified through conjugation of the side chain with (2-[2-(2-amino-ethoxy)-ethoxy]-acetyl)2-Gamma-Glutamic acid-CO-(CH2)16-CO2H
  SITE 20: note = Alpha-methyl-L-3-(4-pyridyl)-L-alanine
  SITE 21: note = Ornithine
  SITE 25: note = Alpha-methyl-L-tyrosine

SEQ ID NO: 335 - protein, 39 aa, synthetic construct; identical to SEQ ID NO: 95
  SITE 2: note = 2-aminoisobutyric acid
  SITE 6: note = (S)-2-amino-3-(2-fluorophenyl)-2-methylpropanoic acid
  SITE 10: note = 3-(4-pyridyl)-L-alanine
  SITE 11: note = Alpha-methyl-L-serine
  SITE 13: note = Alpha-methyl-L-leucine
  SITE 16: note = Ornithine
  SITE 17: note = Lysine is chemically modified through conjugation of the side chain with (2-[2-(2-amino-ethoxy)-ethoxy]-acetyl)2-Gamma-Glutamic acid-CO-(CH2)16-CO2H
  SITE 20: note = Alpha-methyl-L-3-(4-pyridyl)-L-alanine
  SITE 21: note = Ornithine
  SITE 24: note = D-Glutamic acid
  SITE 25: note = Alpha-methyl-L-tyrosine

SEQ ID NO: 336 - protein, 39 aa, synthetic construct; identical to SEQ ID NO: 95
  SITE 2: note = 2-aminoisobutyric acid
  SITE 6: note = (S)-2-amino-3-(2-fluorophenyl)-2-methylpropanoic acid
  SITE 10: note = 3-(4-pyridyl)-L-alanine
  SITE 11: note = Alpha-methyl-L-serine
  SITE 13: note = Alpha-methyl-L-leucine
  SITE 16: note = Ornithine
  SITE 17: note = Lysine is chemically modified through conjugation of the side chain with (2-[2-(2-amino-ethoxy)-ethoxy]-acetyl)2-Gamma-Glutamic acid-CO-(CH2)16-CO2H
  SITE 20: note = Alpha-methyl-L-3-(4-pyridyl)-L-alanine
  SITE 21: note = Ornithine
  SITE 25: note = Alpha-methyl-L-tyrosine

SEQ ID NO: 337 - protein, 39 aa, synthetic construct; identical to SEQ ID NO: 97
  SITE 2: note = 2-aminoisobutyric acid
  SITE 6: note = (S)-2-amino-3-(2-fluorophenyl)-2-methylpropanoic acid
  SITE 11: note = Alpha-methyl-L-serine
  SITE 13: note = Alpha-methyl-L-leucine
  SITE 16: note = Ornithine
  SITE 17: note = Lysine is chemically modified through conjugation of the side chain with (2-[2-(2-amino-ethoxy)-ethoxy]-acetyl)2-Gamma-Glutamic acid-CO-(CH2)16-CO2H
  SITE 20: note = Alpha-methyl-L-3-(4-pyridyl)-L-alanine
  SITE 21: note = Ornithine
  SITE 24: note = D-Glutamic acid
  SITE 25: note = Alpha-methyl-L-tyrosine

SEQ ID NO: 338 - protein, 39 aa, synthetic construct; identical to SEQ ID NO: 97
  SITE 2: note = 2-aminoisobutyric acid
  SITE 6: note = (S)-2-amino-3-(2-fluorophenyl)-2-methylpropanoic acid
  SITE 11: note = Alpha-methyl-L-serine
  SITE 13: note = Alpha-methyl-L-leucine
  SITE 16: note = Ornithine
  SITE 17: note = Lysine is chemically modified through conjugation of the side chain with (2-[2-(2-amino-ethoxy)-ethoxy]-acetyl)2-Gamma-Glutamic acid-CO-(CH2)16-CO2H
  SITE 20: note = Alpha-methyl-L-3-(4-pyridyl)-L-alanine
  SITE 21: note = Ornithine
  SITE 25: note = Alpha-methyl-L-tyrosine

SEQ ID NO: 339 - protein, 31 aa, synthetic construct; identical to SEQ ID NO: 99
  SITE 2: note = 2-aminoisobutyric acid
  SITE 6: note = (S)-2-amino-3-(2-fluorophenyl)-2-methylpropanoic acid
  SITE 10: note = 3-(4-pyridyl)-L-alanine
  SITE 11: note = Alpha-methyl-L-serine
  SITE 13: note = Alpha-methyl-L-leucine
  SITE 16: note = Ornithine
  SITE 17: note = Lysine is chemically modified through conjugation of the side chain with (2-[2-(2-amino-ethoxy)-ethoxy]-acetyl)2-Gamma-Glutamic acid-CO-(CH2)16-CO2H
  SITE 20: note = Alpha-methyl-L-3-(4-pyridyl)-L-alanine
  SITE 21: note = Ornithine
  SITE 25: note = Alpha-methyl-L-tyrosine

SEQ ID NO: 340 - protein, 31 aa, synthetic construct; identical to SEQ ID NO: 100
  SITE 2: note = 2-aminoisobutyric acid
  SITE 6: note = (S)-2-amino-3-(2-fluorophenyl)-2-methylpropanoic acid
  SITE 11: note = Alpha-methyl-L-serine
  SITE 13: note = Alpha-methyl-L-leucine
  SITE 16: note = Ornithine
  SITE 17: note = Lysine is chemically modified through conjugation of the side chain with (2-[2-(2-amino-ethoxy)-ethoxy]-acetyl)2-Gamma-Glutamic acid-CO-(CH2)16-CO2H
  SITE 20: note = Alpha-methyl-L-3-(4-pyridyl)-L-alanine
  SITE 21: note = Ornithine
  SITE 24: note = D-Glutamic acid
  SITE 25: note = Alpha-methyl-L-tyrosine

SEQ ID NO: 341 - protein, 39 aa, synthetic construct; identical to SEQ ID NO: 101
  SITE 2: note = 2-aminoisobutyric acid
  SITE 6: note = (S)-2-amino-3-(2-fluorophenyl)-2-methylpropanoic acid
  SITE 10: note = 3-(4-pyridyl)-L-alanine
  SITE 11: note = Alpha-methyl-L-serine
  SITE 13: note = Alpha-methyl-L-leucine
  SITE 16: note = Ornithine
  SITE 17: note = Lysine is chemically modified through conjugation of the side chain with (2-[2-(2-amino-ethoxy)-ethoxy]-acetyl)2-Gamma-Glutamic acid-CO-(CH2)16-CO2H
  SITE 20: note = Alpha-methyl-L-3-(4-pyridyl)-L-alanine
  SITE 21: note = Ornithine
  SITE 25: note = Alpha-methyl-L-tyrosine

SEQ ID NO: 342 - protein, 39 aa, synthetic construct; identical to SEQ ID NO: 102
  SITE 2: note = 2-aminoisobutyric acid
  SITE 6: note = (S)-2-amino-3-(2-fluorophenyl)-2-methylpropanoic acid
  SITE 11: note = Alpha-methyl-L-serine
  SITE 13: note = Alpha-methyl-L-leucine
  SITE 16: note = Ornithine
  SITE 17: note = Lysine is chemically modified through conjugation of the side chain with (2-[2-(2-amino-ethoxy)-ethoxy]-acetyl)2-Gamma-Glutamic acid-CO-(CH2)16-CO2H
  SITE 20: note = Alpha-methyl-L-3-(4-pyridyl)-L-alanine
  SITE 21: note = Ornithine
  SITE 24: note = D-Glutamic acid
  SITE 25: note = Alpha-methyl-L-tyrosine

SEQ ID NO: 343 - protein, 39 aa, synthetic construct; identical to SEQ ID NO: 101
  SITE 2: note = 2-aminoisobutyric acid
  SITE 6: note = (S)-2-amino-3-(2-fluorophenyl)-2-methylpropanoic acid
  SITE 10: note = 3-(4-pyridyl)-L-alanine
  SITE 11: note = Alpha-methyl-L-serine
  SITE 13: note = Alpha-methyl-L-leucine
  SITE 16: note = Ornithine
  SITE 20: note = Alpha-methyl-L-3-(4-pyridyl)-L-alanine
  SITE 21: note = Ornithine
  SITE 25: note = Alpha-methyl-L-tyrosine

SEQ ID NO: 344 - protein, 39 aa, synthetic construct; identical to SEQ ID NO: 102
  SITE 2: note = 2-aminoisobutyric acid
  SITE 6: note = (S)-2-amino-3-(2-fluorophenyl)-2-methylpropanoic acid
  SITE 11: note = Alpha-methyl-L-serine
  SITE 13: note = Alpha-methyl-L-leucine
  SITE 16: note = Ornithine
  SITE 17: note = Lysine is chemically modified through conjugation of the side chain with epsilon-Lysine-epsilon-Lysine-Gamma-Glutamic acid-CO-(CH2)16-CO2H
  SITE 20: note = Alpha-methyl-L-3-(4-pyridyl)-L-alanine
  SITE 21: note = Ornithine
  SITE 24: note = D-Glutamic acid
  SITE 25: note = Alpha-methyl-L-tyrosine

SEQ ID NO: 345 - protein, 41 aa, synthetic construct; identical to SEQ ID NO: 103
  SITE 2: note = 2-aminoisobutyric acid
  SITE 6: note = (S)-2-amino-3-(2-fluorophenyl)-2-methylpropanoic acid
  SITE 10: note = 3-(4-pyridyl)-L-alanine
  SITE 11: note = Alpha-methyl-L-serine
  SITE 13: note = Alpha-methyl-L-leucine
  SITE 16: note = Ornithine
  SITE 17: note = Lysine is chemically modified through conjugation of the side chain with (2-[2-(2-amino-ethoxy)-ethoxy]-acetyl)2-Gamma-Glutamic acid-CO-(CH2)16-CO2H
  SITE 20: note = Alpha-methyl-L-3-(4-pyridyl)-L-alanine
  SITE 21: note = Ornithine
  SITE 25: note = Alpha-methyl-L-tyrosine

SEQ ID NO: 346 - protein, 41 aa, synthetic construct; identical to SEQ ID NO: 104
  SITE 2: note = 2-aminoisobutyric acid
  SITE 6: note = (S)-2-amino-3-(2-fluorophenyl)-2-methylpropanoic acid
  SITE 11: note = Alpha-methyl-L-serine
  SITE 13: note = Alpha-methyl-L-leucine
  SITE 16: note = Ornithine
  SITE 17: note = Lysine is chemically modified through conjugation of the side chain with (2-[2-(2-amino-ethoxy)-ethoxy]-acetyl)2-Gamma-Glutamic acid-CO-(CH2)16-CO2H
  SITE 20: note = Alpha-methyl-L-3-(4-pyridyl)-L-alanine
  SITE 21: note = Ornithine
  SITE 25: note = Alpha-methyl-L-tyrosine

SEQ ID NO: 347 - protein, 41 aa, synthetic construct; identical to SEQ ID NO: 103
  SITE 2: note = 2-aminoisobutyric acid
  SITE 6: note = (S)-2-amino-3-(2-fluorophenyl)-2-methylpropanoic acid
  SITE 10: note = 3-(4-pyridyl)-L-alanine
  SITE 11: note = Alpha-methyl-L-serine
  SITE 13: note = Alpha-methyl-L-leucine
  SITE 16: note = Ornithine
  SITE 17: note = Lysine is chemically modified through conjugation of the side chain with epsilon-Lysine-epsilon-Lysine-Gamma-Glutamic acid-CO-(CH2)16-CO2H
  SITE 20: note = Alpha-methyl-L-3-(4-pyridyl)-L-alanine
  SITE 21: note = Ornithine
  SITE 25: note = Alpha-methyl-L-tyrosine

SEQ ID NO: 348 - protein, 41 aa, synthetic construct; identical to SEQ ID NO: 104
  SITE 2: note = 2-aminoisobutyric acid
  SITE 6: note = (S)-2-amino-3-(2-fluorophenyl)-2-methylpropanoic acid
  SITE 11: note = Alpha-methyl-L-serine
  SITE 13: note = Alpha-methyl-L-leucine
  SITE 16: note = Ornithine
  SITE 17: note = Lysine is chemically modified through conjugation of the side chain with epsilon-Lysine-epsilon-Lysine-Gamma-Glutamic acid-CO-(CH2)16-CO2H
  SITE 20: note = Alpha-methyl-L-3-(4-pyridyl)-L-alanine
  SITE 21: note = Ornithine
  SITE 25: note = Alpha-methyl-L-tyrosine

SEQ ID NO: 349 - protein, 34 aa, synthetic construct; identical to SEQ ID NO: 106
  SITE 2: note = 2-aminoisobutyric acid
  SITE 6: note = (S)-2-amino-3-(2-fluorophenyl)-2-methylpropanoic acid
  SITE 10: note = 3-(4-pyridyl)-L-alanine
  SITE 11: note = Alpha-methyl-L-serine
  SITE 13: note = Alpha-methyl-L-leucine
  SITE 16: note = Ornithine
  SITE 17: note = Lysine is chemically modified through conjugation of the side chain with (2-[2-(2-amino-ethoxy)-ethoxy]-acetyl)2-Gamma-Glutamic acid-CO-(CH2)16-CO2H
  SITE 20: note = Alpha-methyl-L-3-(4-pyridyl)-L-alanine
  SITE 21: note = Ornithine
  SITE 25: note = Alpha-methyl-L-tyrosine

SEQ ID NO: 350 - protein, 34 aa, synthetic construct; identical to SEQ ID NO: 107
  SITE 2: note = 2-aminoisobutyric acid
  SITE 6: note = (S)-2-amino-3-(2-fluorophenyl)-2-methylpropanoic acid
  SITE 11: note = Alpha-methyl-L-serine
  SITE 13: note = Alpha-methyl-L-leucine
  SITE 16: note = Ornithine
  SITE 17: note = Lysine is chemically modified through conjugation of the side chain with (2-[2-(2-amino-ethoxy)-ethoxy]-acetyl)2-Gamma-Glutamic acid-CO-(CH2)16-CO2H
  SITE 20: note = Alpha-methyl-L-3-(4-pyridyl)-L-alanine
  SITE 21: note = Ornithine
  SITE 24: note = D-Glutamic acid
  SITE 25: note = Alpha-methyl-L-tyrosine

SEQ ID NO: 351 - protein, 34 aa, synthetic construct; identical to SEQ ID NO: 106
  SITE 2: note = 2-aminoisobutyric acid
  SITE 6: note = (S)-2-amino-3-(2-fluorophenyl)-2-methylpropanoic acid
  SITE 10: note = 3-(4-pyridyl)-L-alanine
  SITE 11: note = Alpha-methyl-L-serine
  SITE 13: note = Alpha-methyl-L-leucine
  SITE 16: note = Ornithine
  SITE 17: note = Lysine is chemically modified through conjugation of the side chain with epsilon-Lysine-epsilon-Lysine-Gamma-Glutamic acid-CO-(CH2)16-CO2H
  SITE 20: note = Alpha-methyl-L-3-(4-pyridyl)-L-alanine
  SITE 21: note = Ornithine
  SITE 25: note = Alpha-methyl-L-tyrosine

SEQ ID NO: 352 - protein, 34 aa, synthetic construct; identical to SEQ ID NO: 107
  SITE 2: note = 2-aminoisobutyric acid
  SITE 6: note = (S)-2-amino-3-(2-fluorophenyl)-2-methylpropanoic acid
  SITE 11: note = Alpha-methyl-L-serine
  SITE 13: note = Alpha-methyl-L-leucine
  SITE 16: note = Ornithine
  SITE 17: note = Lysine is chemically modified through conjugation of the side chain with epsilon-Lysine-epsilon-Lysine-Gamma-Glutamic acid-CO-(CH2)16-CO2H
  SITE 20: note = Alpha-methyl-L-3-(4-pyridyl)-L-alanine
  SITE 21: note = Ornithine
  SITE 24: note = D-Glutamic acid
  SITE 25: note = Alpha-methyl-L-tyrosine

SEQ ID NO: 353 - protein, 31 aa, synthetic construct; identical to SEQ ID NO: 99
  SITE 2: note = 2-aminoisobutyric acid
  SITE 6: note = (S)-2-amino-3-(2-fluorophenyl)-2-methylpropanoic acid
  SITE 10: note = 3-(4-pyridyl)-L-alanine
  SITE 11: note = Alpha-methyl-L-serine
  SITE 13: note = Alpha-methyl-L-leucine
  SITE 16: note = Ornithine
  SITE 17: note = Lysine is chemically modified through conjugation of the side chain with epsilon-Lysine-epsilon-Lysine-Gamma-Glutamic acid-CO-(CH2)16-CO2H
  SITE 20: note = Alpha-methyl-L-3-(4-pyridyl)-L-alanine
  SITE 21: note = Ornithine
  SITE 25: note = Alpha-methyl-L-tyrosine

SEQ ID NO: 354 - protein, 31 aa, synthetic construct; identical to SEQ ID NO: 100
  SITE 2: note = 2-aminoisobutyric acid
  SITE 6: note = (S)-2-amino-3-(2-fluorophenyl)-2-methylpropanoic acid
  SITE 11: note = Alpha-methyl-L-serine
  SITE 13: note = Alpha-methyl-L-leucine
  SITE 16: note = Ornithine
  SITE 17: note = Lysine is chemically modified through conjugation of the side chain with epsilon-Lysine-epsilon-Lysine-Gamma-Glutamic acid-CO-(CH2)16-CO2H
  SITE 20: note = Alpha-methyl-L-3-(4-pyridyl)-L-alanine
  SITE 21: note = Ornithine
  SITE 24: note = D-Glutamic acid
  SITE 25: note = Alpha-methyl-L-tyrosine

SEQ ID NO: 355 - protein, 39 aa, synthetic construct; identical to SEQ ID NO: 95
  SITE 2: note = 2-aminoisobutyric acid
  SITE 6: note = (S)-2-amino-3-(2-fluorophenyl)-2-methylpropanoic acid
  SITE 10: note = 3-(4-pyridyl)-L-alanine
  SITE 11: note = Alpha-methyl-L-serine
  SITE 13: note = Alpha-methyl-L-leucine
  SITE 16: note = Ornithine
  SITE 17: note = Lysine is chemically modified through conjugation of the side chain with epsilon-Lysine-epsilon-Lysine-Gamma-Glutamic acid-CO-(CH2)16-CO2H
  SITE 20: note = Alpha-methyl-L-3-(4-pyridyl)-L-alanine
  SITE 21: note = Ornithine
  SITE 25: note = Alpha-methyl-L-tyrosine

SEQ ID NO: 356 - protein, 39 aa, synthetic construct; identical to SEQ ID NO: 97
  SITE 2: note = 2-aminoisobutyric acid
  SITE 6: note = (S)-2-amino-3-(2-fluorophenyl)-2-methylpropanoic acid
  SITE 11: note = Alpha-methyl-L-serine
  SITE 13: note = Alpha-methyl-L-leucine
  SITE 16: note = Ornithine
  SITE 17: note = Lysine is chemically modified through conjugation of the side chain with epsilon-Lysine-epsilon-Lysine-Gamma-Glutamic acid-CO-(CH2)16-CO2H
  SITE 20: note = Alpha-methyl-L-3-(4-pyridyl)-L-alanine
  SITE 21: note = Ornithine
  SITE 24: note = D-Glutamic acid
  SITE 25: note = Alpha-methyl-L-tyrosine

SEQ ID NO: 357 - protein, 34 aa, synthetic construct; identical to SEQ ID NO: 108
  SITE 2: note = 2-aminoisobutyric acid
  SITE 6: note = (S)-2-amino-3-(2-fluorophenyl)-2-methylpropanoic acid
  SITE 10: note = 3-(4-pyridyl)-L-alanine
  SITE 11: note = Alpha-methyl-L-serine
  SITE 13: note = Alpha-methyl-L-leucine
  SITE 16: note = Ornithine
  SITE 17: note = Lysine is chemically modified through conjugation of the side chain with (2-[2-(2-amino-ethoxy)-ethoxy]-acetyl)2-Gamma-Glutamic acid-CO-(CH2)16-CO2H
  SITE 20: note = Alpha-methyl-L-3-(4-pyridyl)-L-alanine
  SITE 21: note = Ornithine
  SITE 24: note = D-Glutamic acid
  SITE 25: note = Alpha-methyl-L-tyrosine

SEQ ID NO: 358 - protein, 31 aa, synthetic construct; identical to SEQ ID NO: 99
  SITE 2: note = 2-aminoisobutyric acid
  SITE 6: note = (S)-2-amino-3-(2-fluorophenyl)-2-methylpropanoic acid
  SITE 10: note = 3-(4-pyridyl)-L-alanine
  SITE 11: note = Alpha-methyl-L-serine
  SITE 13: note = Alpha-methyl-L-leucine
  SITE 16: note = Ornithine
  SITE 17: note = Lysine is chemically modified through conjugation of the side chain with (2-[2-(2-amino-ethoxy)-ethoxy]-acetyl)2-Gamma-Glutamic acid-CO-(CH2)16-CO2H
  SITE 20: note = Alpha-methyl-L-3-(4-pyridyl)-L-alanine
  SITE 21: note = Ornithine
  SITE 24: note = D-Glutamic acid
  SITE 25: note = Alpha-methyl-L-tyrosine

SEQ ID NO: 359 - protein, 39 aa, synthetic construct; identical to SEQ ID NO: 95
  SITE 2: note = 2-aminoisobutyric acid
  SITE 6: note = (S)-2-amino-3-(2-fluorophenyl)-2-methylpropanoic acid
  SITE 10: note = 3-(4-pyridyl)-L-alanine
  SITE 11: note = Alpha-methyl-L-serine
  SITE 13: note = Alpha-methyl-L-leucine
  SITE 16: note = Ornithine
  SITE 17: note = Lysine is chemically modified through conjugation of the side chain with epsilon-Lysine-epsilon-Lysine-Gamma-Glutamic acid-CO-(CH2)16-CO2H
  SITE 20: note = Alpha-methyl-L-3-(4-pyridyl)-L-alanine
  SITE 21: note = Ornithine
  SITE 24: note = D-Glutamic acid
  SITE 25: note = Alpha-methyl-L-tyrosine

SEQ ID NO: 360 - protein, 39 aa, synthetic construct; identical to SEQ ID NO: 110
  SITE 2: note = 2-aminoisobutyric acid
  SITE 6: note = (S)-2-amino-3-(2-fluorophenyl)-2-methylpropanoic acid
  SITE 10: note = 3-(4-pyridyl)-L-alanine
  SITE 11: note = Alpha-methyl-L-serine
  SITE 13: note = Alpha-methyl-L-leucine
  SITE 16: note = Ornithine
  SITE 17: note = Lysine is chemically modified through conjugation of the side chain with (2-[2-(2-amino-ethoxy)-ethoxy]-acetyl)2-Gamma-Glutamic acid-CO-(CH2)16-CO2H
  SITE 20: note = Alpha-methyl-L-3-(4-pyridyl)-L-alanine
  SITE 21: note = Ornithine
  SITE 25: note = Alpha-methyl-L-tyrosine

SEQ ID NO: 361 - protein, 39 aa, synthetic construct; identical to SEQ ID NO: 110
  SITE 2: note = 2-aminoisobutyric acid
  SITE 6: note = (S)-2-amino-3-(2-fluorophenyl)-2-methylpropanoic acid
  SITE 10: note = 3-(4-pyridyl)-L-alanine
  SITE 11: note = Alpha-methyl-L-serine
  SITE 13: note = Alpha-methyl-L-leucine
  SITE 16: note = Ornithine
  SITE 17: note = Lysine is chemically modified through conjugation of the side chain with epsilon-Lysine-epsilon-Lysine-Gamma-Glutamic acid-CO-(CH2)16-CO2H
  SITE 20: note = Alpha-methyl-L-3-(4-pyridyl)-L-alanine
  SITE 21: note = Ornithine
  SITE 25: note = Alpha-methyl-L-tyrosine

SEQ ID NO: 362 - protein, 39 aa, synthetic construct; identical to SEQ ID NO: 111
  SITE 2: note = 2-aminoisobutyric acid
  SITE 6: note = (S)-2-amino-3-(2-fluorophenyl)-2-methylpropanoic acid
  SITE 11: note = Alpha-methyl-L-serine
  SITE 13: note = Alpha-methyl-L-leucine
  SITE 16: note = Ornithine
  SITE 17: note = Lysine is chemically modified through conjugation of the side chain with (2-[2-(2-amino-ethoxy)-ethoxy]-acetyl)2-Gamma-Glutamic acid-CO-(CH2)16-CO2H
  SITE 20: note = Alpha-methyl-L-3-(4-pyridyl)-L-alanine
  SITE 21: note = Ornithine
  SITE 25: note = Alpha-methyl-L-tyrosine

SEQ ID NO: 363 - protein, 39 aa, synthetic construct; identical to SEQ ID NO: 111
  SITE 2: note = 2-aminoisobutyric acid
  SITE 6: note = (S)-2-amino-3-(2-fluorophenyl)-2-methylpropanoic acid
  SITE 11: note = Alpha-methyl-L-serine
  SITE 13: note = Alpha-methyl-L-leucine
  SITE 16: note = Ornithine
  SITE 17: note = Lysine is chemically modified through conjugation of the side chain with epsilon-Lysine-epsilon-Lysine-Gamma-Glutamic acid-CO-(CH2)16-CO2H
  SITE 20: note = Alpha-methyl-L-3-(4-pyridyl)-L-alanine
  SITE 21: note = Ornithine
  SITE 25: note = Alpha-methyl-L-tyrosine

SEQ ID NO: 364 - protein, 39 aa, synthetic construct; identical to SEQ ID NO: 112
  SITE 2: note = 2-aminoisobutyric acid
  SITE 6: note = (S)-2-amino-3-(2-fluorophenyl)-2-methylpropanoic acid
  SITE 11: note = Alpha-methyl-L-serine
  SITE 13: note = Alpha-methyl-L-leucine
  SITE 16: note = Ornithine
  SITE 17: note = Lysine is chemically modified through conjugation of the side chain with (2-[2-(2-amino-ethoxy)-ethoxy]-acetyl)2-Gamma-Glutamic acid-CO-(CH2)16-CO2H
  SITE 20: note = Alpha-methyl-L-3-(4-pyridyl)-L-alanine
  SITE 21: note = Ornithine
  SITE 24: note = D-Glutamic acid
  SITE 25: note = Alpha-methyl-L-tyrosine
  SITE 29: note = 2-aminoisobutyric acid

SEQ ID NO: 365 - protein, 39 aa, synthetic construct; identical to SEQ ID NO: 113
  SITE 2: note = 2-aminoisobutyric acid
  SITE 6: note = (S)-2-amino-3-(2-fluorophenyl)-2-methylpropanoic acid
  SITE 11: note = Alpha-methyl-L-serine
  SITE 13: note = Alpha-methyl-L-leucine
  SITE 16: note = Ornithine
  SITE 17: note = Lysine is chemically modified through conjugation of the side chain with (2-[2-(2-amino-ethoxy)-ethoxy]-acetyl)2-Gamma-Glutamic acid-CO-(CH2)16-CO2H
  SITE 20: note = Alpha-methyl-L-3-(4-pyridyl)-L-alanine
  SITE 24: note = D-Glutamic acid
  SITE 25: note = Alpha-methyl-L-tyrosine

SEQ ID NO: 366 - protein, 39 aa, synthetic construct; identical to SEQ ID NO: 114
  SITE 2: note = 2-aminoisobutyric acid
  SITE 6: note = (S)-2-amino-3-(2-fluorophenyl)-2-methylpropanoic acid
  SITE 11: note = Alpha-methyl-L-serine
  SITE 13: note = Alpha-methyl-L-leucine
  SITE 16: note = Ornithine
  SITE 17: note = Lysine is chemically modified through conjugation of the side chain with (2-[2-(2-amino-ethoxy)-ethoxy]-acetyl)2-Gamma-Glutamic acid-CO-(CH2)16-CO2H
  SITE 20: note = Alpha-methyl-L-3-(4-pyridyl)-L-alanine
  SITE 25: note = Alpha-methyl-L-tyrosine

SEQ ID NO: 367 - protein, 39 aa, synthetic construct; identical to SEQ ID NO: 114
  SITE 2: note = 2-aminoisobutyric acid
  SITE 6: note = (S)-2-amino-3-(2-fluorophenyl)-2-methylpropanoic acid
  SITE 11: note = Alpha-methyl-L-serine
  SITE 13: note = Alpha-methyl-L-leucine
  SITE 16: note = Ornithine
  SITE 17: note = Lysine is chemically modified through conjugation of the side chain with (2-[2-(2-amino-ethoxy)-ethoxy]-acetyl)2-Gamma-Glutamic acid-CO-(CH2)16-CO2H
  SITE 20: note = 2-aminoisobutyric acid
  SITE 25: note = Alpha-methyl-L-tyrosine

SEQ ID NO: 368 - protein, 39 aa, synthetic construct; identical to SEQ ID NO: 116
  SITE 2: note = 2-aminoisobutyric acid
  SITE 6: note = (S)-2-amino-3-(2-fluorophenyl)-2-methylpropanoic acid
  SITE 11: note = Alpha-methyl-L-serine
  SITE 13: note = Alpha-methyl-L-leucine
  SITE 16: note = Ornithine
  SITE 17: note = Lysine is chemically modified through conjugation of the side chain with (2-[2-(2-amino-ethoxy)-ethoxy]-acetyl)2-Gamma-Glutamic acid-CO-(CH2)16-CO2H
  SITE 20: note = Alpha-methyl-L-3-(4-pyridyl)-L-alanine
  SITE 25: note = Alpha-methyl-L-tyrosine

SEQ ID NO: 369 - protein, 39 aa, synthetic construct; identical to SEQ ID NO: 117
  SITE 2: note = 2-aminoisobutyric acid
  SITE 6: note = (S)-2-amino-3-(2-fluorophenyl)-2-methylpropanoic acid
  SITE 10: note = 3-(4-pyridyl)-L-alanine
  SITE 13: note = Alpha-methyl-L-leucine
  SITE 16: note = Ornithine
  SITE 17: note = Lysine is chemically modified through conjugation of the side chain with (2-[2-(2-amino-ethoxy)-ethoxy]-acetyl)2-Gamma-Glutamic acid-CO-(CH2)16-CO2H
  SITE 20: note = Alpha-methyl-L-3-(4-pyridyl)-L-alanine
  SITE 21: note = Ornithine
  SITE 25: note = Alpha-methyl-L-tyrosine

SEQ ID NO: 370 - protein, 31 aa, synthetic construct; identical to SEQ ID NO: 118
  SITE 2: note = 2-aminoisobutyric acid
  SITE 6: note = (S)-2-amino-3-(2-fluorophenyl)-2-methylpropanoic acid
  SITE 11: note = Alpha-methyl-L-serine
  SITE 13: note = Alpha-methyl-L-leucine
  SITE 16: note = Ornithine
  SITE 17: note = Lysine is chemically modified through conjugation of the side chain with (2-[2-(2-amino-ethoxy)-ethoxy]-acetyl)2-Gamma-Glutamic acid-CO-(CH2)16-CO2H
  SITE 20: note = Alpha-methyl-L-3-(4-pyridyl)-L-alanine
  SITE 21: note = Ornithine
  SITE 24: note = D-Glutamic acid
  SITE 25: note = Alpha-methyl-L-tyrosine
  SITE 29: note = 2-aminoisobutyric acid

SEQ ID NO: 371 - protein, 39 aa, synthetic construct; identical to SEQ ID NO: 119
  SITE 2: note = 2-aminoisobutyric acid
  SITE 4: note = D-Alanine
  SITE 6: note = (S)-2-amino-3-(2-fluorophenyl)-2-methylpropanoic acid
  SITE 11: note = Alpha-methyl-L-serine
  SITE 13: note = Alpha-methyl-L-leucine
  SITE 16: note = Ornithine
  SITE 17: note = Lysine is chemically modified through conjugation of the side chain with (2-[2-(2-amino-ethoxy)-ethoxy]-acetyl)2-Gamma-Glutamic acid-CO-(CH2)16-CO2H
  SITE 20: note = Alpha-methyl-L-3-(4-pyridyl)-L-alanine
  SITE 25: note = Alpha-methyl-L-tyrosine

SEQ ID NO: 372 - protein, 39 aa, synthetic construct; identical to SEQ ID NO: 114
  SITE 2: note = Alpha-methyl-L-serine
  SITE 6: note = (S)-2-amino-3-(2-fluorophenyl)-2-methylpropanoic acid
  SITE 11: note = Alpha-methyl-L-serine
  SITE 13: note = Alpha-methyl-L-leucine
  SITE 16: note = Ornithine
  SITE 17: note = Lysine is chemically modified through conjugation of the side chain with (2-[2-(2-amino-ethoxy)-ethoxy]-acetyl)2-Gamma-Glutamic acid-CO-(CH2)16-CO2H
  SITE 20: note = Alpha-methyl-L-3-(4-pyridyl)-L-alanine
  SITE 25: note = Alpha-methyl-L-tyrosine

SEQ ID NO: 373 - protein, 39 aa, synthetic construct; identical to SEQ ID NO: 114
  SITE 2: note = L-isovaline
  SITE 6: note = (S)-2-amino-3-(2-fluorophenyl)-2-methylpropanoic acid
  SITE 11: note = Alpha-methyl-L-serine
  SITE 13: note = Alpha-methyl-L-leucine
  SITE 16: note = Ornithine
  SITE 17: note = Lysine is chemically modified through conjugation of the side chain with (2-[2-(2-amino-ethoxy)-ethoxy]-acetyl)2-Gamma-Glutamic acid-CO-(CH2)16-CO2H
  SITE 20: note = Alpha-methyl-L-3-(4-pyridyl)-L-alanine
  SITE 25: note = Alpha-methyl-L-tyrosine

SEQ ID NO: 374 - protein, 39 aa, synthetic construct; identical to SEQ ID NO: 122
  SITE 2: note = 2-aminoisobutyric acid
  SITE 6: note = (S)-2-amino-3-(2-fluorophenyl)-2-methylpropanoic acid
  SITE 11: note = Alpha-methyl-L-serine
  SITE 13: note = Alpha-methyl-L-leucine
  SITE 16: note = Ornithine
  SITE 17: note = Lysine is chemically modified through conjugation of the side chain with (2-[2-(2-amino-ethoxy)-ethoxy]-acetyl)2-Gamma-Glutamic acid-CO-(CH2)16-CO2H
  SITE 20: note = Alpha-methyl-L-3-(4-pyridyl)-L-alanine
  SITE 25: note = Alpha-methyl-L-tyrosine

SEQ ID NO: 375 - protein, 39 aa, synthetic construct; identical to SEQ ID NO: 123
  SITE 2: note = 2-aminoisobutyric acid
  SITE 6: note = (S)-2-amino-3-(2-fluorophenyl)-2-methylpropanoic acid
  SITE 11: note = Alpha-methyl-L-serine
  SITE 13: note = Alpha-methyl-L-leucine
  SITE 16: note = Ornithine
  SITE 17: note = Lysine is chemically modified through conjugation of the side chain with (2-[2-(2-amino-ethoxy)-ethoxy]-acetyl)2-Gamma-Glutamic acid-CO-(CH2)16-CO2H
  SITE 20: note = Alpha-methyl-L-3-(4-pyridyl)-L-alanine
  SITE 25: note = Alpha-methyl-L-tyrosine

SEQ ID NO: 376 - protein, 39 aa, synthetic construct; identical to SEQ ID NO: 123
  SITE 2: note = 2-aminoisobutyric acid
  SITE 6: note = (S)-2-amino-3-(2-fluorophenyl)-2-methylpropanoic acid
  SITE 11: note = Alpha-methyl-L-serine
  SITE 13: note = Alpha-methyl-L-leucine
  SITE 16: note = Ornithine
  SITE 17: note = Lysine is chemically modified through conjugation of the side chain with (2-[2-(2-amino-ethoxy)-ethoxy]-acetyl)2-Gamma-Glutamic acid-CO-(CH2)16-CO2H
  SITE 20: note = 2-aminoisobutyric acid
  SITE 25: note = Alpha-methyl-L-tyrosine

SEQ ID NO: 377 - protein, 39 aa, synthetic construct; identical to SEQ ID NO: 125
  SITE 2: note = 2-aminoisobutyric acid
  SITE 6: note = (S)-2-amino-3-(2-fluorophenyl)-2-methylpropanoic acid
  SITE 10: note = 3-(4-pyridyl)-L-alanine
  SITE 11: note = Alpha-methyl-L-serine
  SITE 13: note = Alpha-methyl-L-leucine
  SITE 16: note = Ornithine
  SITE 17: note = Lysine is chemically modified through conjugation of the side chain with (2-[2-(2-amino-ethoxy)-ethoxy]-acetyl)2-Gamma-Glutamic acid-CO-(CH2)16-CO2H
  SITE 20: note = Alpha-methyl-L-3-(4-pyridyl)-L-alanine
  SITE 25: note = Alpha-methyl-L-tyrosine

SEQ ID NO: 378 - protein, 39 aa, synthetic construct; identical to SEQ ID NO: 126
  SITE 2: note = 2-aminoisobutyric acid
  SITE 6: note = (S)-2-amino-3-(2-fluorophenyl)-2-methylpropanoic acid
  SITE 10: note = 3-(4-pyridyl)-L-alanine
  SITE 13: note = Alpha-methyl-L-leucine
  SITE 16: note = Ornithine
  SITE 17: note = Lysine is chemically modified through conjugation of the side chain with (2-[2-(2-amino-ethoxy)-ethoxy]-acetyl)2-Gamma-Glutamic acid-CO-(CH2)16-CO2H
  SITE 20: note = Alpha-methyl-L-3-(4-pyridyl)-L-alanine
  SITE 25: note = Alpha-methyl-L-tyrosine

SEQ ID NO: 379 - protein, 39 aa, synthetic construct; identical to SEQ ID NO: 127
  SITE 2: note = 2-aminoisobutyric acid
  SITE 6: note = (S)-2-amino-3-(2-fluorophenyl)-2-methylpropanoic acid
  SITE 11: note = Alpha-methyl-L-serine
  SITE 13: note = Alpha-methyl-L-leucine
  SITE 16: note = Ornithine
  SITE 17: note = Lysine is chemically modified through conjugation of the side chain with (2-[2-(2-amino-ethoxy)-ethoxy]-acetyl)2-Gamma-Glutamic acid-CO-(CH2)16-CO2H
  SITE 20: note = Alpha-methyl-L-3-(4-pyridyl)-L-alanine
  SITE 25: note = Alpha-methyl-L-tyrosine
  SITE 29: note = 2-aminoisobutyric acid

SEQ ID NO: 380 - protein, 39 aa, synthetic construct; identical to SEQ ID NO: 113
  SITE 2: note = 2-aminoisobutyric acid
  SITE 6: note = (S)-2-amino-3-(2-fluorophenyl)-2-methylpropanoic acid
  SITE 11: note = Alpha-methyl-L-serine
  SITE 13: note = Alpha-methyl-L-leucine
  SITE 16: note = Ornithine
  SITE 17: note = Lysine is chemically modified through conjugation of the side chain with (2-[2-(2-amino-ethoxy)-ethoxy]-acetyl)2-Gamma-Glutamic acid-CO-(CH2)16-CO2H
  SITE 20: note = Alpha-methyl-L-3-(4-pyridyl)-L-alanine
  SITE 25: note = Alpha-methyl-L-tyrosine

SEQ ID NO: 381 - protein, 39 aa, synthetic construct; identical to SEQ ID NO: 129
  SITE 2: note = 2-aminoisobutyric acid
  SITE 6: note = (S)-2-amino-3-(2-fluorophenyl)-2-methylpropanoic acid
  SITE 10: note = 3-(4-pyridyl)-L-alanine
  SITE 11: note = Alpha-methyl-L-serine
  SITE 13: note = Alpha-methyl-L-leucine
  SITE 16: note = Ornithine
  SITE 17: note = Lysine is chemically modified through conjugation of the side chain with (2-[2-(2-amino-ethoxy)-ethoxy]-acetyl)2-Gamma-Glutamic acid-CO-(CH2)16-CO2H
  SITE 20: note = Alpha-methyl-L-3-(4-pyridyl)-L-alanine
  SITE 25: note = Alpha-methyl-L-tyrosine

SEQ ID NO: 382 - protein, 39 aa, synthetic construct; identical to SEQ ID NO: 130
  SITE 2: note = 2-aminoisobutyric acid
  SITE 6: note = (S)-2-amino-3-(2-fluorophenyl)-2-methylpropanoic acid
  SITE 10: note = 3-(4-pyridyl)-L-alanine
  SITE 11: note = Alpha-methyl-L-serine
  SITE 13: note = Alpha-methyl-L-leucine
  SITE 16: note = Ornithine
  SITE 17: note = Lysine is chemically modified through conjugation of the side chain with (2-[2-(2-amino-ethoxy)-ethoxy]-acetyl)2-Gamma-Glutamic acid-CO-(CH2)16-CO2H
  SITE 20: note = Alpha-methyl-L-3-(4-pyridyl)-L-alanine
  SITE 25: note = Alpha-methyl-L-tyrosine

SEQ ID NO: 383 - protein, 39 aa, synthetic construct; identical to SEQ ID NO: 114
  SITE 2: note = 2-aminoisobutyric acid
  SITE 6: note = (S)-2-amino-3-(2-fluorophenyl)-2-methylpropanoic acid
  SITE 11: note = Alpha-methyl-L-serine
  SITE 13: note = Alpha-methyl-L-leucine
  SITE 16: note = Ornithine
  SITE 17: note = Lysine is chemically modified through conjugation of the side chain with 2-[2-(2-amino-ethoxy)-ethoxy]-acetyl-Gamma-Glutamic acid-CO-(CH2)16-CO2H
  SITE 20: note = Alpha-methyl-L-3-(4-pyridyl)-L-alanine
  SITE 25: note = Alpha-methyl-L-tyrosine

SEQ ID NO: 384 - protein, 39 aa, synthetic construct; identical to SEQ ID NO: 131
  SITE 2: note = 2-aminoisobutyric acid
  SITE 6: note = (S)-2-amino-3-(2-fluorophenyl)-2-methylpropanoic acid
  SITE 11: note = Alpha-methyl-L-serine
  SITE 13: note = Alpha-methyl-L-leucine
  SITE 16: note = Ornithine
  SITE 17: note = Lysine is chemically modified through conjugation of the side chain with (2-[2-(2-amino-ethoxy)-ethoxy]-acetyl)2-Gamma-Glutamic acid-CO-(CH2)16-CO2H
  SITE 20: note = Alpha-methyl-L-3-(4-pyridyl)-L-alanine
  SITE 25: note = Alpha-methyl-L-tyrosine
  SITE 29: note = 2-aminoisobutyric acid

SEQ ID NO: 385 - protein, 39 aa, synthetic construct; identical to SEQ ID NO: 132
  SITE 2: note = 2-aminoisobutyric acid
  SITE 6: note = (S)-2-amino-3-(2-fluorophenyl)-2-methylpropanoic acid
  SITE 10: note = 3-(4-pyridyl)-L-alanine
  SITE 11: note = Alpha-methyl-L-serine
  SITE 13: note = Alpha-methyl-L-leucine
  SITE 16: note = Ornithine
  SITE 17: note = Lysine is chemically modified through conjugation of the side chain with (2-[2-(2-amino-ethoxy)-ethoxy]-acetyl)2-Gamma-Glutamic acid-CO-(CH2)16-CO2H
  SITE 20: note = Alpha-methyl-L-3-(4-pyridyl)-L-alanine
  SITE 25: note = Alpha-methyl-L-tyrosine
  SITE 29: note = 2-aminoisobutyric acid

SEQ ID NO: 386 - protein, 39 aa, synthetic construct; identical to SEQ ID NO: 133
  SITE 2: note = 2-aminoisobutyric acid
  SITE 6: note = (S)-2-amino-3-(2-fluorophenyl)-2-methylpropanoic acid
  SITE 10: note = 3-(4-pyridyl)-L-alanine
  SITE 11: note = Alpha-methyl-L-serine
  SITE 13: note = Alpha-methyl-L-leucine
  SITE 16: note = Ornithine
  SITE 17: note = Lysine is chemically modified through conjugation of the side chain with (2-[2-(2-amino-ethoxy)-ethoxy]-acetyl)2-Gamma-Glutamic acid-CO-(CH2)16-CO2H
  SITE 20: note = Alpha-methyl-L-3-(4-pyridyl)-L-alanine
  SITE 25: note = Alpha-methyl-L-tyrosine
  SITE 29: note = 2-aminoisobutyric acid

SEQ ID NO: 387 - protein, 39 aa, synthetic construct; identical to SEQ ID NO: 127
  SITE 2: note = 2-aminoisobutyric acid
  SITE 6: note = (S)-2-amino-3-(2-fluorophenyl)-2-methylpropanoic acid
  SITE 11: note = Alpha-methyl-L-serine
  SITE 13: note = Alpha-methyl-L-leucine
  SITE 16: note = Ornithine
  SITE 17: note = Lysine is chemically modified through conjugation of the side chain with 2-[2-(2-amino-ethoxy)-ethoxy]-acetyl-Gamma-Glutamic acid-CO-(CH2)16-CO2H
  SITE 20: note = Alpha-methyl-L-3-(4-pyridyl)-L-alanine
  SITE 25: note = Alpha-methyl-L-tyrosine
  SITE 29: note = 2-aminoisobutyric acid

SEQ ID NO: 388 - protein, 39 aa, synthetic construct; identical to SEQ ID NO: 134
  SITE 2: note = 2-aminoisobutyric acid
  SITE 6: note = (S)-2-amino-3-(2-fluorophenyl)-2-methylpropanoic acid
  SITE 11: note = Alpha-methyl-L-serine
  SITE 13: note = Alpha-methyl-L-leucine
  SITE 17: note = Lysine is chemically modified through conjugation of the side chain with 2-[2-(2-amino-ethoxy)-ethoxy]-acetyl-Gamma-Glutamic acid-CO-(CH2)16-CO2H
  SITE 20: note = Alpha-methyl-L-3-(4-pyridyl)-L-alanine
  SITE 25: note = Alpha-methyl-L-tyrosine

SEQ ID NO: 389 - protein, 39 aa, synthetic construct; identical to SEQ ID NO: 135
  SITE 2: note = 2-aminoisobutyric acid
  SITE 6: note = (S)-2-amino-3-(2-fluorophenyl)-2-methylpropanoic acid
  SITE 11: note = Alpha-methyl-L-serine
  SITE 13: note = Alpha-methyl-L-leucine
  SITE 17: note = Lysine is chemically modified through conjugation of the side chain with 2-[2-(2-amino-ethoxy)-ethoxy]-acetyl-Gamma-Glutamic acid-CO-(CH2)16-CO2H
  SITE 20: note = Alpha-methyl-L-3-(4-pyridyl)-L-alanine
  SITE 25: note = Alpha-methyl-L-tyrosine
  SITE 29: note = 2-aminoisobutyric acid

SEQ ID NO: 390 - protein, 39 aa, synthetic construct; identical to SEQ ID NO: 136
  SITE 2: note = 2-aminoisobutyric acid
  SITE 6: note = (S)-2-amino-3-(2-fluorophenyl)-2-methylpropanoic acid
  SITE 11: note = Alpha-methyl-L-serine
  SITE 13: note = Alpha-methyl-L-leucine
  SITE 16: note = Ornithine
  SITE 17: note = Lysine is chemically modified through conjugation of the side chain with (2-[2-(2-amino-ethoxy)-ethoxy]-acetyl)2-Gamma-Glutamic acid-CO-(CH2)16-CO2H
  SITE 20: note = Alpha-methyl-L-3-(4-pyridyl)-L-alanine
  SITE 25: note = Alpha-methyl-L-tyrosine

SEQ ID NO: 391 - protein, 39 aa, synthetic construct; identical to SEQ ID NO: 137
  SITE 2: note = 2-aminoisobutyric acid
  SITE 6: note = (S)-2-amino-3-(2-fluorophenyl)-2-methylpropanoic acid
  SITE 11: note = Alpha-methyl-L-serine
  SITE 13: note = Alpha-methyl-L-leucine
  SITE 16: note = Ornithine
  SITE 17: note = Lysine is chemically modified through conjugation of the side chain with (2-[2-(2-amino-ethoxy)-ethoxy]-acetyl)2-Gamma-Glutamic acid-CO-(CH2)16-CO2H
  SITE 20: note = Alpha-methyl-L-3-(4-pyridyl)-L-alanine
  SITE 25: note = Alpha-methyl-L-tyrosine

SEQ ID NO: 392 - protein, 31 aa, synthetic construct; identical to SEQ ID NO: 138
  SITE 2: note = 2-aminoisobutyric acid
  SITE 6: note = (S)-2-amino-3-(2-fluorophenyl)-2-methylpropanoic acid
  SITE 11: note = Alpha-methyl-L-serine
  SITE 13: note = Alpha-methyl-L-leucine
  SITE 16: note = Ornithine
  SITE 17: note = Lysine is chemically modified through conjugation of the side chain with (2-[2-(2-amino-ethoxy)-ethoxy]-acetyl)2-Gamma-Glutamic acid-CO-(CH2)16-CO2H
  SITE 20: note = Alpha-methyl-L-3-(4-pyridyl)-L-alanine
  SITE 25: note = Alpha-methyl-L-tyrosine

SEQ ID NO: 393 - protein, 39 aa, synthetic construct; identical to SEQ ID NO: 139
  SITE 2: note = 2-aminoisobutyric acid
  SITE 6: note = (S)-2-amino-3-(2-fluorophenyl)-2-methylpropanoic acid
  SITE 11: note = Alpha-methyl-L-serine
  SITE 13: note = Alpha-methyl-L-leucine
  SITE 16: note = Ornithine
  SITE 17: note = Lysine is chemically modified through conjugation of the side chain with (2-[2-(2-amino-ethoxy)-ethoxy]-acetyl)2-Gamma-Glutamic acid-CO-(CH2)16-CO2H
  SITE 20: note = 2-aminoisobutyric acid
  SITE 25: note = Alpha-methyl-L-tyrosine

SEQ ID NO: 394 - protein, 39 aa, synthetic construct; identical to SEQ ID NO: 140
  SITE 2: note = 2-aminoisobutyric acid
  SITE 6: note = (S)-2-amino-3-(2-fluorophenyl)-2-methylpropanoic acid
  SITE 10: note = 3-(4-pyridyl)-L-alanine
  SITE 13: note = Alpha-methyl-L-leucine
  SITE 16: note = Ornithine
  SITE 17: note = Lysine is chemically modified through conjugation of the side chain with (2-[2-(2-amino-ethoxy)-ethoxy]-acetyl)2-Gamma-Glutamic acid-CO-(CH2)16-CO2H
  SITE 20: note = Alpha-methyl-L-3-(4-pyridyl)-L-alanine
  SITE 25: note = Alpha-methyl-L-tyrosine

SEQ ID NO: 395 - protein, 39 aa, synthetic construct; identical to SEQ ID NO: 113
  SITE 2: note = 2-aminoisobutyric acid
  SITE 6: note = (S)-2-amino-3-(2-fluorophenyl)-2-methylpropanoic acid
  SITE 11: note = Alpha-methyl-L-serine
  SITE 13: note = Alpha-methyl-L-leucine
  SITE 16: note = Ornithine
  SITE 17: note = Lysine is chemically modified through conjugation of the side chain with 2-[2-(2-amino-ethoxy)-ethoxy]-acetyl-Gamma-Glutamic acid-CO-(CH2)16-CO2H
  SITE 20: note = Alpha-methyl-L-3-(4-pyridyl)-L-alanine
  SITE 25: note = Alpha-methyl-L-tyrosine

SEQ ID NO: 396 - protein, 39 aa, synthetic construct; identical to SEQ ID NO: 129
  SITE 2: note = 2-aminoisobutyric acid
  SITE 6: note = (S)-2-amino-3-(2-fluorophenyl)-2-methylpropanoic acid
  SITE 10: note = 3-(4-pyridyl)-L-alanine
  SITE 11: note = Alpha-methyl-L-serine
  SITE 13: note = Alpha-methyl-L-leucine
  SITE 16: note = Ornithine
  SITE 17: note = Lysine is chemically modified through conjugation of the side chain with 2-[2-(2-amino-ethoxy)-ethoxy]-acetyl-Gamma-Glutamic acid-CO-(CH2)16-CO2H
  SITE 20: note = Alpha-methyl-L-3-(4-pyridyl)-L-alanine
  SITE 25: note = Alpha-methyl-L-tyrosine

SEQ ID NO: 397 - protein, 39 aa, synthetic construct; identical to SEQ ID NO: 141
  SITE 2: note = 2-aminoisobutyric acid
  SITE 6: note = (S)-2-amino-3-(2-fluorophenyl)-2-methylpropanoic acid
  SITE 11: note = Alpha-methyl-L-serine
  SITE 13: note = Alpha-methyl-L-leucine
  SITE 16: note = Ornithine
  SITE 17: note = Lysine is chemically modified through conjugation of the side chain with (2-[2-(2-amino-ethoxy)-ethoxy]-acetyl)2-Gamma-Glutamic acid-CO-(CH2)16-CO2H
  SITE 20: note = Alpha-methyl-L-3-(4-pyridyl)-L-alanine
  SITE 25: note = Alpha-methyl-L-tyrosine

SEQ ID NO: 398 - protein, 39 aa, synthetic construct; identical to SEQ ID NO: 142
  SITE 2: note = 2-aminoisobutyric acid
  SITE 6: note = (S)-2-amino-3-(2-fluorophenyl)-2-methylpropanoic acid
  SITE 11: note = Alpha-methyl-L-serine
  SITE 13: note = Alpha-methyl-L-leucine
  SITE 16: note = Ornithine
  SITE 17: note = Lysine is chemically modified through conjugation of the side chain with (2-[2-(2-amino-ethoxy)-ethoxy]-acetyl)2-Gamma-Glutamic acid-CO-(CH2)16-CO2H
  SITE 20: note = Alpha-methyl-L-3-(4-pyridyl)-L-alanine
  SITE 21: note = Ornithine
  SITE 25: note = Alpha-methyl-L-tyrosine
  SITE 29: note = 2-aminoisobutyric acid

SEQ ID NO: 399 - protein, 39 aa, synthetic construct; identical to SEQ ID NO: 143
  SITE 2: note = 2-aminoisobutyric acid
  SITE 6: note = (S)-2-amino-3-(2-fluorophenyl)-2-methylpropanoic acid
  SITE 11: note = Alpha-methyl-L-serine
  SITE 13: note = Alpha-methyl-L-leucine
  SITE 16: note = Ornithine
  SITE 17: note = Lysine is chemically modified through conjugation of the side chain with (2-[2-(2-amino-ethoxy)-ethoxy]-acetyl)2-Gamma-Glutamic acid-CO-(CH2)16-CO2H
  SITE 20: note = Alpha-methyl-L-3-(4-pyridyl)-L-alanine
  SITE 25: note = Alpha-methyl-L-tyrosine
  SITE 29: note = 2-aminoisobutyric acid

SEQ ID NO: 400 - protein, 39 aa, synthetic construct; identical to SEQ ID NO: 144
  SITE 2: note = 2-aminoisobutyric acid
  SITE 6: note = (S)-2-amino-3-(2-fluorophenyl)-2-methylpropanoic acid
  SITE 11: note = Alpha-methyl-L-serine
  SITE 13: note = Alpha-methyl-L-leucine
  SITE 16: note = Ornithine
  SITE 17: note = Lysine is chemically modified through conjugation of the side chain with (2-[2-(2-amino-ethoxy)-ethoxy]-acetyl)2-Gamma-Glutamic acid-CO-(CH2)16-CO2H
  SITE 20: note = Alpha-methyl-L-3-(4-pyridyl)-L-alanine
  SITE 25: note = Alpha-methyl-L-tyrosine

SEQ ID NO: 401 - protein, 39 aa, synthetic construct; identical to SEQ ID NO: 145
  SITE 2: note = 2-aminoisobutyric acid
  SITE 6: note = (S)-2-amino-3-(2-fluorophenyl)-2-methylpropanoic acid
  SITE 11: note = Alpha-methyl-L-serine
  SITE 13: note = Alpha-methyl-L-leucine
  SITE 16: note = Ornithine
  SITE 17: note = Lysine is chemically modified through conjugation of the side chain with (2-[2-(2-amino-ethoxy)-ethoxy]-acetyl)2-Gamma-Glutamic acid-CO-(CH2)16-CO2H
  SITE 20: note = Alpha-methyl-L-3-(4-pyridyl)-L-alanine
  SITE 25: note = Alpha-methyl-L-tyrosine
  SITE 29: note = 2-aminoisobutyric acid

SEQ ID NO: 402 - protein, 39 aa, synthetic construct; identical to SEQ ID NO: 146
  SITE 2: note = 2-aminoisobutyric acid
  SITE 6: note = (S)-2-amino-3-(2-fluorophenyl)-2-methylpropanoic acid
  SITE 11: note = Alpha-methyl-L-serine
  SITE 13: note = Alpha-methyl-L-leucine
  SITE 16: note = Ornithine
  SITE 17: note = Lysine is chemically modified through conjugation of the side chain with (2-[2-(2-amino-ethoxy)-ethoxy]-acetyl)2-Gamma-Glutamic acid-CO-(CH2)16-CO2H
  SITE 20: note = Alpha-methyl-L-3-(4-pyridyl)-L-alanine
  SITE 25: note = Alpha-methyl-L-tyrosine

SEQ ID NO: 403 - protein, 39 aa, synthetic construct; identical to SEQ ID NO: 147
  SITE 2: note = 2-aminoisobutyric acid
  SITE 6: note = (S)-2-amino-3-(2-fluorophenyl)-2-methylpropanoic acid
  SITE 11: note = Alpha-methyl-L-serine
  SITE 13: note = Alpha-methyl-L-leucine
  SITE 16: note = Ornithine
  SITE 17: note = Lysine is chemically modified through conjugation of the side chain with (2-[2-(2-amino-ethoxy)-ethoxy]-acetyl)2-Gamma-Glutamic acid-CO-(CH2)16-CO2H
  SITE 20: note = Alpha-methyl-L-3-(4-pyridyl)-L-alanine
  SITE 25: note = Alpha-methyl-L-tyrosine
  SITE 29: note = 2-aminoisobutyric acid

SEQ ID NO: 404 - protein, 39 aa, synthetic construct; identical to SEQ ID NO: 144
  SITE 2: note = 2-aminoisobutyric acid
  SITE 6: note = (S)-2-amino-3-(2-fluorophenyl)-2-methylpropanoic acid
  SITE 11: note = Alpha-methyl-L-serine
  SITE 13: note = Alpha-methyl-L-leucine
  SITE 16: note = Ornithine
  SITE 17: note = Lysine is chemically modified through conjugation of the side chain with 2-[2-(2-amino-ethoxy)-ethoxy]-acetyl-Gamma-Glutamic acid-CO-(CH2)16-CO2H
  SITE 20: note = Alpha-methyl-L-3-(4-pyridyl)-L-alanine
  SITE 25: note = Alpha-methyl-L-tyrosine

SEQ ID NO: 405 - protein, 39 aa, synthetic construct; identical to SEQ ID NO: 145
  SITE 2: note = 2-aminoisobutyric acid
  SITE 6: note = (S)-2-amino-3-(2-fluorophenyl)-2-methylpropanoic acid
  SITE 11: note = Alpha-methyl-L-serine
  SITE 13: note = Alpha-methyl-L-leucine
  SITE 16: note = Ornithine
  SITE 17: note = Lysine is chemically modified through conjugation of the side chain with 2-[2-(2-amino-ethoxy)-ethoxy]-acetyl-Gamma-Glutamic acid-CO-(CH2)16-CO2H
  SITE 20: note = Alpha-methyl-L-3-(4-pyridyl)-L-alanine
  SITE 25: note = Alpha-methyl-L-tyrosine
  SITE 29: note = 2-aminoisobutyric acid

SEQ ID NO: 406 - protein, 39 aa, synthetic construct; identical to SEQ ID NO: 146
  SITE 2: note = 2-aminoisobutyric acid
  SITE 6: note = (S)-2-amino-3-(2-fluorophenyl)-2-methylpropanoic acid
  SITE 11: note = Alpha-methyl-L-serine
  SITE 13: note = Alpha-methyl-L-leucine
  SITE 16: note = Ornithine
  SITE 17: note = Lysine is chemically modified through conjugation of the side chain with 2-[2-(2-amino-ethoxy)-ethoxy]-acetyl-Gamma-Glutamic acid-CO-(CH2)16-CO2H
  SITE 20: note = Alpha-methyl-L-3-(4-pyridyl)-L-alanine
  SITE 25: note = Alpha-methyl-L-tyrosine

SEQ ID NO: 407 - protein, 39 aa, synthetic construct; identical to SEQ ID NO: 148
  SITE 2: note = 2-aminoisobutyric acid
  SITE 6: note = (S)-2-amino-3-(2-fluorophenyl)-2-methylpropanoic acid
  SITE 11: note = Alpha-methyl-L-serine
  SITE 13: note = Alpha-methyl-L-leucine
  SITE 16: note = Ornithine
  SITE 17: note = Lysine is chemically modified through conjugation of the side chain with (2-[2-(2-amino-ethoxy)-ethoxy]-acetyl)2-Gamma-Glutamic acid-CO-(CH2)16-CO2H
  SITE 20: note = Alpha-methyl-L-3-(4-pyridyl)-L-alanine
  SITE 25: note = Alpha-methyl-L-tyrosine
  SITE 29: note = 2-aminoisobutyric acid

SEQ ID NO: 408 - protein, 39 aa, synthetic construct; identical to SEQ ID NO: 149
  SITE 2: note = 2-aminoisobutyric acid
  SITE 6: note = (S)-2-amino-3-(2-fluorophenyl)-2-methylpropanoic acid
  SITE 11: note = Alpha-methyl-L-serine
  SITE 13: note = Alpha-methyl-L-leucine
  SITE 16: note = Ornithine
  SITE 17: note = Lysine is chemically modified through conjugation of the side chain with (2-[2-(2-amino-ethoxy)-ethoxy]-acetyl)2-Gamma-Glutamic acid-CO-(CH2)16-CO2H
  SITE 20: note = Alpha-methyl-L-3-(4-pyridyl)-L-alanine
  SITE 25: note = Alpha-methyl-L-tyrosine
  SITE 29: note = 2-aminoisobutyric acid

SEQ ID NO: 409 - protein, 39 aa, synthetic construct; identical to SEQ ID NO: 148
  SITE 2: note = 2-aminoisobutyric acid
  SITE 6: note = (S)-2-amino-3-(2-fluorophenyl)-2-methylpropanoic acid
  SITE 11: note = Alpha-methyl-L-serine
  SITE 13: note = Alpha-methyl-L-leucine
  SITE 16: note = Ornithine
  SITE 17: note = Lysine is chemically modified through conjugation of the side chain with 2-[2-(2-amino-ethoxy)-ethoxy]-acetyl-Gamma-Glutamic acid-CO-(CH2)16-CO2H
  SITE 20: note = Alpha-methyl-L-3-(4-pyridyl)-L-alanine
  SITE 25: note = Alpha-methyl-L-tyrosine
  SITE 29: note = 2-aminoisobutyric acid

SEQ ID NO: 410 - protein, 39 aa, synthetic construct; identical to SEQ ID NO: 149
  SITE 2: note = 2-aminoisobutyric acid
  SITE 6: note = (S)-2-amino-3-(2-fluorophenyl)-2-methylpropanoic acid
  SITE 11: note = Alpha-methyl-L-serine
  SITE 13: note = Alpha-methyl-L-leucine
  SITE 16: note = Ornithine
  SITE 17: note = Lysine is chemically modified through conjugation of the side chain with 2-[2-(2-amino-ethoxy)-ethoxy]-acetyl-Gamma-Glutamic acid-CO-(CH2)16-CO2H
  SITE 20: note = Alpha-methyl-L-3-(4-pyridyl)-L-alanine
  SITE 25: note = Alpha-methyl-L-tyrosine
  SITE 29: note = 2-aminoisobutyric acid

SEQ ID NO: 411 - protein, 39 aa, synthetic construct; identical to SEQ ID NO: 113
  SITE 2: note = Alpha-methyl-L-serine
  SITE 6: note = (S)-2-amino-3-(2-fluorophenyl)-2-methylpropanoic acid
  SITE 11: note = Alpha-methyl-L-serine
  SITE 13: note = Alpha-methyl-L-leucine
  SITE 16: note = Ornithine
  SITE 17: note = Lysine is chemically modified through conjugation of the side chain with 2-[2-(2-amino-ethoxy)-ethoxy]-acetyl-Gamma-Glutamic acid-CO-(CH2)16-CO2H
  SITE 20: note = Alpha-methyl-L-3-(4-pyridyl)-L-alanine
  SITE 25: note = Alpha-methyl-L-tyrosine

SEQ ID NO: 412 - protein, 39 aa, synthetic construct; identical to SEQ ID NO: 113
  SITE 2: note = L-isovaline
  SITE 6: note = (S)-2-amino-3-(2-fluorophenyl)-2-methylpropanoic acid
  SITE 11: note = Alpha-methyl-L-serine
  SITE 13: note = Alpha-methyl-L-leucine
  SITE 16: note = Ornithine
  SITE 17: note = Lysine is chemically modified through conjugation of the side chain with 2-[2-(2-amino-ethoxy)-ethoxy]-acetyl-Gamma-Glutamic acid-CO-(CH2)16-CO2H
  SITE 20: note = Alpha-methyl-L-3-(4-pyridyl)-L-alanine
  SITE 25: note = Alpha-methyl-L-tyrosine

SEQ ID NO: 413 - protein, 39 aa, synthetic construct; identical to SEQ ID NO: 113
  SITE 2: note = 1-Aminocyclobutane-1-carboxylic acid
  SITE 6: note = (S)-2-amino-3-(2-fluorophenyl)-2-methylpropanoic acid
  SITE 11: note = Alpha-methyl-L-serine
  SITE 13: note = Alpha-methyl-L-leucine
  SITE 16: note = Ornithine
  SITE 17: note = Lysine is chemically modified through conjugation of the side chain with 2-[2-(2-amino-ethoxy)-ethoxy]-acetyl-Gamma-Glutamic acid-CO-(CH2)16-CO2H
  SITE 20: note = Alpha-methyl-L-3-(4-pyridyl)-L-alanine
  SITE 25: note = Alpha-methyl-L-tyrosine

SEQ ID NO: 414 - protein, 39 aa, synthetic construct; identical to SEQ ID NO: 153
  SITE 2: note = 2-aminoisobutyric acid
  SITE 6: note = (S)-2-amino-3-(2-fluorophenyl)-2-methylpropanoic acid
  SITE 11: note = Alpha-methyl-L-serine
  SITE 13: note = Alpha-methyl-L-leucine
  SITE 16: note = Ornithine
  SITE 17: note = Lysine is chemically modified through conjugation of the side chain with 2-[2-(2-amino-ethoxy)-ethoxy]-acetyl-Gamma-Glutamic acid-CO-(CH2)16-CO2H
  SITE 20: note = Alpha-methyl-L-3-(4-pyridyl)-L-alanine
  SITE 21: note = Ornithine
  SITE 25: note = Alpha-methyl-L-tyrosine

SEQ ID NO: 415 - protein, 39 aa, synthetic construct; identical to SEQ ID NO: 154
  SITE 2: note = 2-aminoisobutyric acid
  SITE 6: note = (S)-2-amino-3-(2-fluorophenyl)-2-methylpropanoic acid
  SITE 11: note = Alpha-methyl-L-serine
  SITE 13: note = Alpha-methyl-L-leucine
  SITE 16: note = Ornithine
  SITE 17: note = Lysine is chemically modified through conjugation of the side chain with 2-[2-(2-amino-ethoxy)-ethoxy]-acetyl-Gamma-Glutamic acid-CO-(CH2)16-CO2H
  SITE 20: note = Alpha-methyl-L-3-(4-pyridyl)-L-alanine
  SITE 25: note = Alpha-methyl-L-tyrosine

SEQ ID NO: 416 - protein, 39 aa, synthetic construct; identical to SEQ ID NO: 155
  SITE 2: note = 2-aminoisobutyric acid
  SITE 6: note = (S)-2-amino-3-(2-fluorophenyl)-2-methylpropanoic acid
  SITE 11: note = Alpha-methyl-L-serine
  SITE 13: note = Alpha-methyl-L-leucine
  SITE 16: note = Ornithine
  SITE 17: note = Lysine is chemically modified through conjugation of the side chain with 2-[2-(2-amino-ethoxy)-ethoxy]-acetyl-Gamma-Glutamic acid-CO-(CH2)16-CO2H
  SITE 20: note = Alpha-methyl-L-3-(4-pyridyl)-L-alanine
  SITE 21: note = Ornithine
  SITE 24: note = D-Glutamic acid
  SITE 25: note = Alpha-methyl-L-tyrosine

SEQ ID NO: 417 - protein, 39 aa, synthetic construct; identical to SEQ ID NO: 156
  SITE 2: note = 2-aminoisobutyric acid
  SITE 6: note = (S)-2-amino-3-(2-fluorophenyl)-2-methylpropanoic acid
  SITE 11: note = Alpha-methyl-L-serine
  SITE 13: note = Alpha-methyl-L-leucine
  SITE 16: note = Ornithine
  SITE 17: note = Lysine is chemically modified through conjugation of the side chain with 2-[2-(2-amino-ethoxy)-ethoxy]-acetyl-Gamma-Glutamic acid-CO-(CH2)16-CO2H
  SITE 20: note = Alpha-methyl-L-3-(4-pyridyl)-L-alanine
  SITE 21: note = Ornithine
  SITE 24: note = D-Glutamic acid
  SITE 25: note = Alpha-methyl-L-tyrosine

SEQ ID NO: 418 - protein, 39 aa, synthetic construct; identical to SEQ ID NO: 155
  SITE 2: note = 2-aminoisobutyric acid
  SITE 6: note = (S)-2-amino-3-(2-fluorophenyl)-2-methylpropanoic acid
  SITE 11: note = Alpha-methyl-L-serine
  SITE 13: note = Alpha-methyl-L-leucine
  SITE 16: note = Ornithine
  SITE 17: note = Lysine is chemically modified through conjugation of the side chain with 2-[2-(2-amino-ethoxy)-ethoxy]-acetyl-Gamma-Glutamic acid-CO-(CH2)16-CO2H
  SITE 20: note = Alpha-methyl-L-3-(4-pyridyl)-L-alanine
  SITE 21: note = Ornithine
  SITE 25: note = Alpha-methyl-L-tyrosine

SEQ ID NO: 419 - protein, 39 aa, synthetic construct; identical to SEQ ID NO: 156
  SITE 2: note = 2-aminoisobutyric acid
  SITE 6: note = (S)-2-amino-3-(2-fluorophenyl)-2-methylpropanoic acid
  SITE 11: note = Alpha-methyl-L-serine
  SITE 13: note = Alpha-methyl-L-leucine
  SITE 16: note = Ornithine
  SITE 17: note = Lysine is chemically modified through conjugation of the side chain with 2-[2-(2-amino-ethoxy)-ethoxy]-acetyl-Gamma-Glutamic acid-CO-(CH2)16-CO2H
  SITE 20: note = Alpha-methyl-L-3-(4-pyridyl)-L-alanine
  SITE 21: note = Ornithine
  SITE 25: note = Alpha-methyl-L-tyrosine

SEQ ID NO: 420 - protein, 39 aa, synthetic construct; identical to SEQ ID NO: 159
  SITE 2: note = 2-aminoisobutyric acid
  SITE 6: note = (S)-2-amino-3-(2-fluorophenyl)-2-methylpropanoic acid
  SITE 11: note = Alpha-methyl-L-serine
  SITE 13: note = Alpha-methyl-L-leucine
  SITE 16: note = Ornithine
  SITE 17: note = Lysine is chemically modified through conjugation of the side chain with 2-[2-(2-amino-ethoxy)-ethoxy]-acetyl-Gamma-Glutamic acid-CO-(CH2)16-CO2H
  SITE 20: note = Alpha-methyl-L-3-(4-pyridyl)-L-alanine
  SITE 25: note = Alpha-methyl-L-tyrosine

SEQ ID NO: 421 - protein, 39 aa, synthetic construct; identical to SEQ ID NO: 159
  SITE 2: note = 2-aminoisobutyric acid
  SITE 6: note = (S)-2-amino-3-(2-fluorophenyl)-2-methylpropanoic acid
  SITE 11: note = Alpha-methyl-L-serine
  SITE 13: note = Alpha-methyl-L-leucine
  SITE 16: note = Ornithine
  SITE 17: note = Lysine is chemically modified through conjugation of the side chain with 2-[2-(2-amino-ethoxy)-ethoxy]-acetyl-Gamma-Glutamic acid-CO-(CH2)16-CO2H
  SITE 20: note = Alpha-methyl-L-3-(4-pyridyl)-L-alanine
  SITE 24: note = D-Glutamic acid
  SITE 25: note = Alpha-methyl-L-tyrosine

SEQ ID NO: 422 - protein, 39 aa, synthetic construct; identical to SEQ ID NO: 161
  SITE 2: note = 2-aminoisobutyric acid
  SITE 6: note = (S)-2-amino-3-(2-fluorophenyl)-2-methylpropanoic acid
  SITE 11: note = Alpha-methyl-L-serine
  SITE 13: note = Alpha-methyl-L-leucine
  SITE 16: note = Ornithine
  SITE 17: note = Lysine is chemically modified through conjugation of the side chain with 2-[2-(2-amino-ethoxy)-ethoxy]-acetyl-Gamma-Glutamic acid-CO-(CH2)16-CO2H
  SITE 20: note = Alpha-methyl-L-3-(4-pyridyl)-L-alanine
  SITE 21: note = Ornithine
  SITE 25: note = Alpha-methyl-L-tyrosine

SEQ ID NO: 423 - protein, 39 aa, synthetic construct; identical to SEQ ID NO: 161
  SITE 2: note = 2-aminoisobutyric acid
  SITE 6: note = (S)-2-amino-3-(2-fluorophenyl)-2-methylpropanoic acid
  SITE 11: note = Alpha-methyl-L-serine
  SITE 13: note = Alpha-methyl-L-leucine
  SITE 16: note = Ornithine
  SITE 17: note = Lysine is chemically modified through conjugation of the side chain with 2-[2-(2-amino-ethoxy)-ethoxy]-acetyl-Gamma-Glutamic acid-CO-(CH2)16-CO2H
  SITE 20: note = Alpha-methyl-L-3-(4-pyridyl)-L-alanine
  SITE 21: note = Ornithine
  SITE 24: note = D-Glutamic acid
  SITE 25: note = Alpha-methyl-L-tyrosine

SEQ ID NO: 424 - protein, 39 aa, synthetic construct; identical to SEQ ID NO: 113
  SITE 2: note = 2-aminoisobutyric acid
  SITE 6: note = (S)-2-amino-3-(2-fluorophenyl)-2-methylpropanoic acid
  SITE 11: note = Alpha-methyl-L-serine
  SITE 13: note = Alpha-methyl-L-leucine
  SITE 16: note = Ornithine
  SITE 17: note = Lysine is chemically modified through conjugation of the side chain with 2-[2-(2-amino-ethoxy)-ethoxy]-acetyl-Gamma-Glutamic acid-CO-(CH2)16-CO2H
  SITE 20: note = Alpha-methyl-L-3-(4-pyridyl)-L-alanine
  SITE 24: note = D-Glutamic acid
  SITE 25: note = Alpha-methyl-L-tyrosine

SEQ ID NO: 425 - protein, 39 aa, synthetic construct; identical to SEQ ID NO: 97
  SITE 2: note = 2-aminoisobutyric acid
  SITE 6: note = (S)-2-amino-3-(2-fluorophenyl)-2-methylpropanoic acid
  SITE 11: note = Alpha-methyl-L-serine
  SITE 13: note = Alpha-methyl-L-leucine
  SITE 16: note = Ornithine
  SITE 17: note = Lysine is chemically modified through conjugation of the side chain with 2-[2-(2-amino-ethoxy)-ethoxy]-acetyl-Gamma-Glutamic acid-CO-(CH2)16-CO2H
  SITE 20: note = Alpha-methyl-L-3-(4-pyridyl)-L-alanine
  SITE 21: note = Ornithine
  SITE 25: note = Alpha-methyl-L-tyrosine

SEQ ID NO: 426 - protein, 39 aa, synthetic construct; identical to SEQ ID NO: 97
  SITE 2: note = 2-aminoisobutyric acid
  SITE 6: note = (S)-2-amino-3-(2-fluorophenyl)-2-methylpropanoic acid
  SITE 11: note = Alpha-methyl-L-serine
  SITE 13: note = Alpha-methyl-L-leucine
  SITE 16: note = Ornithine
  SITE 17: note = Lysine is chemically modified through conjugation of the side chain with 2-[2-(2-amino-ethoxy)-ethoxy]-acetyl-Gamma-Glutamic acid-CO-(CH2)16-CO2H
  SITE 20: note = Alpha-methyl-L-3-(4-pyridyl)-L-alanine
  SITE 21: note = Ornithine
  SITE 24: note = D-Glutamic acid
  SITE 25: note = Alpha-methyl-L-tyrosine

SEQ ID NO: 427 - protein, 39 aa, synthetic construct; identical to SEQ ID NO: 163
  SITE 2: note = 2-aminoisobutyric acid
  SITE 6: note = (S)-2-amino-3-(2-fluorophenyl)-2-methylpropanoic acid
  SITE 11: note = Alpha-methyl-L-serine
  SITE 13: note = Alpha-methyl-L-leucine
  SITE 16: note = Ornithine
  SITE 17: note = Lysine is chemically modified through conjugation of the side chain with 2-[2-(2-amino-ethoxy)-ethoxy]-acetyl-Gamma-Glutamic acid-CO-(CH2)16-CO2H
  SITE 20: note = 2-aminoisobutyric acid
  SITE 25: note = Alpha-methyl-L-tyrosine

SEQ ID NO: 428 - protein, 39 aa, synthetic construct; identical to SEQ ID NO: 161
  SITE 2: note = 2-aminoisobutyric acid
  SITE 6: note = (S)-2-amino-3-(2-fluorophenyl)-2-methylpropanoic acid
  SITE 11: note = Alpha-methyl-L-serine
  SITE 13: note = Alpha-methyl-L-leucine
  SITE 16: note = Ornithine
  SITE 17: note = Lysine is chemically modified through conjugation of the side chain with 2-[2-(2-amino-ethoxy)-ethoxy]-acetyl-Gamma-Glutamic acid-CO-(CH2)16-CO2H
  SITE 20: note = 2-aminoisobutyric acid
  SITE 21: note = Ornithine
  SITE 24: note = D-Glutamic acid
  SITE 25: note = Alpha-methyl-L-tyrosine

SEQ ID NO: 429 - protein, 39 aa, synthetic construct; identical to SEQ ID NO: 161
  SITE 2: note = 2-aminoisobutyric acid
  SITE 6: note = (S)-2-amino-3-(2-fluorophenyl)-2-methylpropanoic acid
  SITE 11: note = Alpha-methyl-L-serine
  SITE 13: note = Alpha-methyl-L-leucine
  SITE 16: note = Ornithine
  SITE 17: note = Lysine is chemically modified through conjugation of the side chain with 2-[2-(2-amino-ethoxy)-ethoxy]-acetyl-Gamma-Glutamic acid-CO-(CH2)16-CO2H
  SITE 20: note = 2-aminoisobutyric acid
  SITE 21: note = Ornithine
  SITE 25: note = Alpha-methyl-L-tyrosine

SEQ ID NO: 430 - protein, 39 aa, synthetic construct; identical to SEQ ID NO: 166
  SITE 2: note = 2-aminoisobutyric acid
  SITE 6: note = (S)-2-amino-3-(2-fluorophenyl)-2-methylpropanoic acid
  SITE 11: note = Alpha-methyl-L-serine
  SITE 13: note = Alpha-methyl-L-leucine
  SITE 16: note = Ornithine
  SITE 17: note = Lysine is chemically modified through conjugation of the side chain with 2-[2-(2-amino-ethoxy)-ethoxy]-acetyl-Gamma-Glutamic acid-CO-(CH2)16-CO2H
  SITE 20: note = 2-aminoisobutyric acid
  SITE 21: note = Ornithine
  SITE 24: note = D-Glutamine
  SITE 25: note = Alpha-methyl-L-tyrosine

SEQ ID NO: 431 - protein, 39 aa, synthetic construct; identical to SEQ ID NO: 166
  SITE 2: note = 2-aminoisobutyric acid
  SITE 6: note = (S)-2-amino-3-(2-fluorophenyl)-2-methylpropanoic acid
  SITE 11: note = Alpha-methyl-L-serine
  SITE 13: note = Alpha-methyl-L-leucine
  SITE 16: note = Ornithine
  SITE 17: note = Lysine is chemically modified through conjugation of the side chain with 2-[2-(2-amino-ethoxy)-ethoxy]-acetyl-Gamma-Glutamic acid-CO-(CH2)16-CO2H
  SITE 20: note = 2-aminoisobutyric acid
  SITE 21: note = Ornithine
  SITE 25: note = Alpha-methyl-L-tyrosine

SEQ ID NO: 432 - protein, 39 aa, synthetic construct; identical to SEQ ID NO: 159
  SITE 2: note = 2-aminoisobutyric acid
  SITE 6: note = (S)-2-amino-3-(2-fluorophenyl)-2-methylpropanoic acid
  SITE 11: note = Alpha-methyl-L-serine
  SITE 13: note = Alpha-methyl-L-leucine
  SITE 16: note = Ornithine
  SITE 17: note = Lysine is chemically modified through conjugation of the side chain with 2-[2-(2-amino-ethoxy)-ethoxy]-acetyl-Gamma-Glutamic acid-CO-(CH2)16-CO2H
  SITE 20: note = 2-aminoisobutyric acid
  SITE 24: note = D-Glutamic acid
  SITE 25: note = Alpha-methyl-L-tyrosine

SEQ ID NO: 433 - protein, 39 aa, synthetic construct; identical to SEQ ID NO: 159
  SITE 2: note = 2-aminoisobutyric acid
  SITE 6: note = (S)-2-amino-3-(2-fluorophenyl)-2-methylpropanoic acid
  SITE 11: note = Alpha-methyl-L-serine
  SITE 13: note = Alpha-methyl-L-leucine
  SITE 16: note = Ornithine
  SITE 17: note = Lysine is chemically modified through conjugation of the side chain with 2-[2-(2-amino-ethoxy)-ethoxy]-acetyl-Gamma-Glutamic acid-CO-(CH2)16-CO2H
  SITE 20: note = 2-aminoisobutyric acid
  SITE 25: note = Alpha-methyl-L-tyrosine

SEQ ID NO: 434 - protein, 39 aa, synthetic construct; identical to SEQ ID NO: 116
  SITE 2: note = 2-aminoisobutyric acid
  SITE 6: note = (S)-2-amino-3-(2-fluorophenyl)-2-methylpropanoic acid
  SITE 11: note = Alpha-methyl-L-serine
  SITE 13: note = Alpha-methyl-L-leucine
  SITE 16: note = Ornithine
  SITE 17: note = Lysine is chemically modified through conjugation of the side chain with 2-[2-(2-amino-ethoxy)-ethoxy]-acetyl-Gamma-Glutamic acid-CO-(CH2)16-CO2H
  SITE 20: note = 2-aminoisobutyric acid
  SITE 24: note = D-Glutamine
  SITE 25: note = Alpha-methyl-L-tyrosine

SEQ ID NO: 435 - protein, 39 aa, synthetic construct; identical to SEQ ID NO: 144
  SITE 2: note = 1-Aminocyclobutane-1-carboxylic acid
  SITE 6: note = (S)-2-amino-3-(2-fluorophenyl)-2-methylpropanoic acid
  SITE 11: note = Alpha-methyl-L-serine
  SITE 13: note = Alpha-methyl-L-leucine
  SITE 16: note = Ornithine
  SITE 17: note = Lysine is chemically modified through conjugation of the side chain with 2-[2-(2-amino-ethoxy)-ethoxy]-acetyl-Gamma-Glutamic acid-CO-(CH2)16-CO2H
  SITE 20: note = Alpha-methyl-L-3-(4-pyridyl)-L-alanine
  SITE 25: note = Alpha-methyl-L-tyrosine

SEQ ID NO: 436 - protein, 39 aa, synthetic construct; identical to SEQ ID NO: 172
  SITE 2: note = D-Alanine
  SITE 6: note = (S)-2-amino-3-(2-fluorophenyl)-2-methylpropanoic acid
  SITE 11: note = Alpha-methyl-L-serine
  SITE 13: note = Alpha-methyl-L-leucine
  SITE 16: note = Ornithine
  SITE 17: note = Lysine is chemically modified through conjugation of the side chain with 2-[2-(2-amino-ethoxy)-ethoxy]-acetyl-Gamma-Glutamic acid-CO-(CH2)16-CO2H
  SITE 20: note = Alpha-methyl-L-3-(4-pyridyl)-L-alanine
  SITE 25: note = Alpha-methyl-L-tyrosine

SEQ ID NO: 437 - protein, 39 aa, synthetic construct; identical to SEQ ID NO: 173
  SITE 2: note = D-Alanine
  SITE 6: note = (S)-2-amino-3-(2-fluorophenyl)-2-methylpropanoic acid
  SITE 11: note = Alpha-methyl-L-serine
  SITE 13: note = Alpha-methyl-L-leucine
  SITE 16: note = Ornithine
  SITE 17: note = Lysine is chemically modified through conjugation of the side chain with 2-[2-(2-amino-ethoxy)-ethoxy]-acetyl-Gamma-Glutamic acid-CO-(CH2)16-CO2H
  SITE 20: note = Alpha-methyl-L-3-(4-pyridyl)-L-alanine
  SITE 21: note = Ornithine
  SITE 25: note = Alpha-methyl-L-tyrosine

SEQ ID NO: 438 - protein, 39 aa, synthetic construct; identical to SEQ ID NO: 173
  SITE 2: note = D-Alanine
  SITE 6: note = (S)-2-amino-3-(2-fluorophenyl)-2-methylpropanoic acid
  SITE 11: note = Alpha-methyl-L-serine
  SITE 13: note = Alpha-methyl-L-leucine
  SITE 16: note = Ornithine
  SITE 17: note = Lysine is chemically modified through conjugation of the side chain with 2-[2-(2-amino-ethoxy)-ethoxy]-acetyl-Gamma-Glutamic acid-CO-(CH2)16-CO2H
  SITE 20: note = Alpha-methyl-L-3-(4-pyridyl)-L-alanine
  SITE 21: note = Ornithine
  SITE 24: note = D-Glutamic acid
  SITE 25: note = Alpha-methyl-L-tyrosine

SEQ ID NO: 439 - protein, 39 aa, synthetic construct; identical to SEQ ID NO: 175
  SITE 2: note = D-Alanine
  SITE 6: note = (S)-2-amino-3-(2-fluorophenyl)-2-methylpropanoic acid
  SITE 11: note = Alpha-methyl-L-serine
  SITE 13: note = Alpha-methyl-L-leucine
  SITE 16: note = Ornithine
  SITE 17: note = Lysine is chemically modified through conjugation of the side chain with 2-[2-(2-amino-ethoxy)-ethoxy]-acetyl-Gamma-Glutamic acid-CO-(CH2)16-CO2H
  SITE 20: note = Alpha-methyl-L-3-(4-pyridyl)-L-alanine
  SITE 25: note = Alpha-methyl-L-tyrosine

SEQ ID NO: 440 - protein, 39 aa, synthetic construct; identical to SEQ ID NO: 175
  SITE 2: note = D-Alanine
  SITE 6: note = (S)-2-amino-3-(2-fluorophenyl)-2-methylpropanoic acid
  SITE 11: note = Alpha-methyl-L-serine
  SITE 13: note = Alpha-methyl-L-leucine
  SITE 16: note = Ornithine
  SITE 17: note = Lysine is chemically modified through conjugation of the side chain with 2-[2-(2-amino-ethoxy)-ethoxy]-acetyl-Gamma-Glutamic acid-CO-(CH2)16-CO2H
  SITE 20: note = Alpha-methyl-L-3-(4-pyridyl)-L-alanine
  SITE 24: note = D-Glutamic acid
  SITE 25: note = Alpha-methyl-L-tyrosine

SEQ ID NO: 441 - protein, 39 aa, synthetic construct; identical to SEQ ID NO: 177
  SITE 2: note = D-Alanine
  SITE 6: note = (S)-2-amino-3-(2-fluorophenyl)-2-methylpropanoic acid
  SITE 11: note = Alpha-methyl-L-serine
  SITE 13: note = Alpha-methyl-L-leucine
  SITE 16: note = Ornithine
  SITE 17: note = Lysine is chemically modified through conjugation of the side chain with 2-[2-(2-amino-ethoxy)-ethoxy]-acetyl-Gamma-Glutamic acid-CO-(CH2)16-CO2H
  SITE 20: note = Alpha-methyl-L-3-(4-pyridyl)-L-alanine
  SITE 21: note = Ornithine
  SITE 25: note = Alpha-methyl-L-tyrosine

SEQ ID NO: 442 - protein, 39 aa, synthetic construct; identical to SEQ ID NO: 178
  SITE 2: note = D-Alanine
  SITE 6: note = (S)-2-amino-3-(2-fluorophenyl)-2-methylpropanoic acid
  SITE 11: note = Alpha-methyl-L-serine
  SITE 13: note = Alpha-methyl-L-leucine
  SITE 16: note = Ornithine
  SITE 17: note = Lysine is chemically modified through conjugation of the side chain with 2-[2-(2-amino-ethoxy)-ethoxy]-acetyl-Gamma-Glutamic acid-CO-(CH2)16-CO2H
  SITE 20: note = 2-aminoisobutyric acid
  SITE 21: note = Ornithine
  SITE 24: note = D-Glutamine
  SITE 25: note = Alpha-methyl-L-tyrosine

SEQ ID NO: 443 - protein, 39 aa, synthetic construct; identical to SEQ ID NO: 178
  SITE 2: note = D-Alanine
  SITE 6: note = (S)-2-amino-3-(2-fluorophenyl)-2-methylpropanoic acid
  SITE 11: note = Alpha-methyl-L-serine
  SITE 13: note = Alpha-methyl-L-leucine
  SITE 16: note = Ornithine
  SITE 17: note = Lysine is chemically modified through conjugation of the side chain with 2-[2-(2-amino-ethoxy)-ethoxy]-acetyl-Gamma-Glutamic acid-CO-(CH2)16-CO2H
  SITE 20: note = 2-aminoisobutyric acid
  SITE 21: note = Ornithine
  SITE 25: note = Alpha-methyl-L-tyrosine

SEQ ID NO: 444 - protein, 39 aa, synthetic construct; identical to SEQ ID NO: 173
  SITE 2: note = D-Alanine
  SITE 6: note = (S)-2-amino-3-(2-fluorophenyl)-2-methylpropanoic acid
  SITE 11: note = Alpha-methyl-L-serine
  SITE 13: note = Alpha-methyl-L-leucine
  SITE 16: note = Ornithine
  SITE 17: note = Lysine is chemically modified through conjugation of the side chain with 2-[2-(2-amino-ethoxy)-ethoxy]-acetyl-Gamma-Glutamic acid-CO-(CH2)16-CO2H
  SITE 20: note = 2-aminoisobutyric acid
  SITE 21: note = Ornithine
  SITE 25: note = Alpha-methyl-L-tyrosine

SEQ ID NO: 445 - protein, 39 aa, synthetic construct; identical to SEQ ID NO: 93
  SITE 2: note = 2-aminoisobutyric acid
  SITE 6: note = (S)-2-amino-3-(2-fluorophenyl)-2-methylpropanoic acid
  SITE 10: note = 3-(4-pyridyl)-L-alanine
  SITE 13: note = Alpha-methyl-L-leucine
  SITE 16: note = Ornithine
  SITE 17: note = Lysine is chemically modified through conjugation of the side chain with 2-[2-(2-amino-ethoxy)-ethoxy]-acetyl-Gamma-Glutamic acid-CO-(CH2)16-CO2H
  SITE 20: note = Alpha-methyl-L-3-(4-pyridyl)-L-alanine
  SITE 21: note = Ornithine
  SITE 25: note = Alpha-methyl-L-tyrosine

SEQ ID NO: 446 - protein, 39 aa, synthetic construct; identical to SEQ ID NO: 95
  SITE 2: note = 2-aminoisobutyric acid
  SITE 6: note = (S)-2-amino-3-(2-fluorophenyl)-2-methylpropanoic acid
  SITE 10: note = 3-(4-pyridyl)-L-alanine
  SITE 11: note = Alpha-methyl-L-serine
  SITE 13: note = Alpha-methyl-L-leucine
  SITE 16: note = Ornithine
  SITE 17: note = Lysine is chemically modified through conjugation of the side chain with 2-[2-(2-amino-ethoxy)-ethoxy]-acetyl-Gamma-Glutamic acid-CO-(CH2)16-CO2H
  SITE 20: note = Alpha-methyl-L-3-(4-pyridyl)-L-alanine
  SITE 21: note = Ornithine
  SITE 24: note = D-Glutamic acid
  SITE 25: note = Alpha-methyl-L-tyrosine

SEQ ID NO: 447 - protein, 39 aa, synthetic construct; identical to SEQ ID NO: 130
  SITE 2: note = 2-aminoisobutyric acid
  SITE 6: note = (S)-2-amino-3-(2-fluorophenyl)-2-methylpropanoic acid
  SITE 10: note = 3-(4-pyridyl)-L-alanine
  SITE 11: note = Alpha-methyl-L-serine
  SITE 13: note = Alpha-methyl-L-leucine
  SITE 16: note = Ornithine
  SITE 17: note = Lysine is chemically modified through conjugation of the side chain with 2-[2-(2-amino-ethoxy)-ethoxy]-acetyl-Gamma-Glutamic acid-CO-(CH2)16-CO2H
  SITE 20: note = Alpha-methyl-L-3-(4-pyridyl)-L-alanine
  SITE 25: note = Alpha-methyl-L-tyrosine

SEQ ID NO: 448 - protein, 39 aa, synthetic construct; identical to SEQ ID NO: 181
  SITE 2: note = 2-aminoisobutyric acid
  SITE 6: note = (S)-2-amino-3-(2-fluorophenyl)-2-methylpropanoic acid
  SITE 10: note = 3-(4-pyridyl)-L-alanine
  SITE 13: note = Alpha-methyl-L-leucine
  SITE 16: note = Ornithine
  SITE 17: note = Lysine is chemically modified through conjugation of the side chain with 2-[2-(2-amino-ethoxy)-ethoxy]-acetyl-Gamma-Glutamic acid-CO-(CH2)16-CO2H
  SITE 20: note = Alpha-methyl-L-3-(4-pyridyl)-L-alanine
  SITE 25: note = Alpha-methyl-L-tyrosine

SEQ ID NO: 449 - protein, 39 aa, synthetic construct; identical to SEQ ID NO: 97
  SITE 2: note = 2-aminoisobutyric acid
  SITE 6: note = (S)-2-amino-3-(2-fluorophenyl)-2-methylpropanoic acid
  SITE 11: note = Alpha-methyl-L-serine
  SITE 13: note = Alpha-methyl-L-leucine
  SITE 16: note = Ornithine
  SITE 17: note = Lysine is chemically modified through conjugation of the side chain with 2-[2-(2-amino-ethoxy)-ethoxy]-acetyl-Gamma-Glutamic acid-CO-(CH2)16-CO2H
  SITE 20: note = 2-aminoisobutyric acid
  SITE 21: note = Ornithine
  SITE 25: note = Alpha-methyl-L-tyrosine

SEQ ID NO: 450 - protein, 39 aa, synthetic construct; identical to SEQ ID NO: 130
  SITE 2: note = 2-aminoisobutyric acid
  SITE 6: note = (S)-2-amino-3-(2-fluorophenyl)-2-methylpropanoic acid
  SITE 10: note = 3-(4-pyridyl)-L-alanine
  SITE 11: note = Alpha-methyl-L-serine
  SITE 13: note = Alpha-methyl-L-leucine
  SITE 16: note = Ornithine
  SITE 17: note = Lysine is chemically modified through conjugation of the side chain with 2-[2-(2-amino-ethoxy)-ethoxy]-acetyl-Gamma-Glutamic acid-CO-(CH2)16-CO2H
  SITE 20: note = Alpha-methyl-L-3-(4-pyridyl)-L-alanine
  SITE 24: note = D-Glutamic acid
  SITE 25: note = Alpha-methyl-L-tyrosine

SEQ ID NO: 451 - protein, 39 aa, synthetic construct; identical to SEQ ID NO: 173
  SITE 2: note = D-Alanine
  SITE 6: note = (S)-2-amino-3-(2-fluorophenyl)-2-methylpropanoic acid
  SITE 11: note = Alpha-methyl-L-serine
  SITE 13: note = Alpha-methyl-L-leucine
  SITE 16: note = Ornithine
  SITE 17: note = Lysine is chemically modified through conjugation of the side chain with (2-[2-(2-amino-ethoxy)-ethoxy]-acetyl)2-Gamma-Glutamic acid-CO-(CH2)16-CO2H
  SITE 20: note = Alpha-methyl-L-3-(4-pyridyl)-L-alanine
  SITE 21: note = Ornithine
  SITE 25: note = Alpha-methyl-L-tyrosine

SEQ ID NO: 452 - protein, 39 aa, synthetic construct; identical to SEQ ID NO: 177
  SITE 2: note = D-Alanine
  SITE 6: note = (S)-2-amino-3-(2-fluorophenyl)-2-methylpropanoic acid
  SITE 11: note = Alpha-methyl-L-serine
  SITE 13: note = Alpha-methyl-L-leucine
  SITE 16: note = Ornithine
  SITE 17: note = Lysine is chemically modified through conjugation of the side chain with (2-[2-(2-amino-ethoxy)-ethoxy]-acetyl)2-Gamma-Glutamic acid-CO-(CH2)16-CO2H
  SITE 20: note = Alpha-methyl-L-3-(4-pyridyl)-L-alanine
  SITE 21: note = Ornithine
  SITE 25: note = Alpha-methyl-L-tyrosine

SEQ ID NO: 453 - protein, 39 aa, synthetic construct; identical to SEQ ID NO: 97
  SITE 2: note = 2-aminoisobutyric acid
  SITE 6: note = (S)-2-amino-3-(2-fluorophenyl)-2-methylpropanoic acid
  SITE 11: note = Alpha-methyl-L-serine
  SITE 13: note = Alpha-methyl-L-leucine
  SITE 16: note = Ornithine
  SITE 17: note = Lysine is chemically modified through conjugation of the side chain with 2-[2-(2-amino-ethoxy)-ethoxy]-acetyl-Gamma-Glutamic acid-CO-(CH2)16-CO2H
  SITE 20: note = 2-aminoisobutyric acid
  SITE 21: note = Ornithine
  SITE 24: note = D-Glutamic acid
  SITE 25: note = Alpha-methyl-L-tyrosine

SEQ ID NO: 454 - protein, 39 aa, synthetic construct; identical to SEQ ID NO: 185
  SITE 1: note = N-Methyl-L-tyrosine
  SITE 2: note = 2-aminoisobutyric acid
  SITE 6: note = (S)-2-amino-3-(2-fluorophenyl)-2-methylpropanoic acid
  SITE 11: note = Alpha-methyl-L-serine
  SITE 13: note = Alpha-methyl-L-leucine
  SITE 16: note = Ornithine
  SITE 17: note = Lysine is chemically modified through conjugation of the side chain with (2-[2-(2-amino-ethoxy)-ethoxy]-acetyl)2-Gamma-Glutamic acid-CO-(CH2)16-CO2H
  SITE 20: note = Alpha-methyl-L-3-(4-pyridyl)-L-alanine
  SITE 25: note = Alpha-methyl-L-tyrosine

SEQ ID NO: 455 - protein, 39 aa, synthetic construct; identical to SEQ ID NO: 97
  SITE 2: note = 2-aminoisobutyric acid
  SITE 6: note = (S)-2-amino-3-(2-fluorophenyl)-2-methylpropanoic acid
  SITE 11: note = Alpha-methyl-L-serine
  SITE 13: note = Alpha-methyl-L-leucine
  SITE 16: note = Ornithine
  SITE 17: note = Lysine is chemically modified through conjugation of the side chain with (2-[2-(2-amino-ethoxy)-ethoxy]-acetyl)2-Gamma-Glutamic acid-CO-(CH2)18-CO2H
  SITE 20: note = Alpha-methyl-L-3-(4-pyridyl)-L-alanine
  SITE 21: note = Ornithine
  SITE 24: note = D-Glutamic acid
  SITE 25: note = Alpha-methyl-L-tyrosine

SEQ ID NO: 456 - protein, 39 aa, synthetic construct; identical to SEQ ID NO: 111
  SITE 2: note = 2-aminoisobutyric acid
  SITE 6: note = (S)-2-amino-3-(2-fluorophenyl)-2-methylpropanoic acid
  SITE 11: note = Alpha-methyl-L-serine
  SITE 13: note = Alpha-methyl-L-leucine
  SITE 16: note = Ornithine
  SITE 17: note = Lysine is chemically modified through conjugation of the side chain with (2-[2-(2-amino-ethoxy)-ethoxy]-acetyl)2-Gamma-Glutamic acid-CO-(CH2)18-CO2H
  SITE 20: note = Alpha-methyl-L-3-(4-pyridyl)-L-alanine
  SITE 21: note = Ornithine
  SITE 25: note = Alpha-methyl-L-tyrosine

SEQ ID NO: 457 - protein, 39 aa, synthetic construct; identical to SEQ ID NO: 112
  SITE 2: note = 2-aminoisobutyric acid
  SITE 6: note = (S)-2-amino-3-(2-fluorophenyl)-2-methylpropanoic acid
  SITE 11: note = Alpha-methyl-L-serine
  SITE 13: note = Alpha-methyl-L-leucine
  SITE 16: note = Ornithine
  SITE 17: note = Lysine is chemically modified through conjugation of the side chain with (2-[2-(2-amino-ethoxy)-ethoxy]-acetyl)2-Gamma-Glutamic acid-CO-(CH2)16-CO2H
  SITE 20: note = Alpha-methyl-L-3-(4-pyridyl)-L-alanine
  SITE 21: note = Ornithine
  SITE 25: note = Alpha-methyl-L-tyrosine
  SITE 29: note = 2-aminoisobutyric acid

SEQ ID NO: 458 - protein, 39 aa, synthetic construct; identical to SEQ ID NO: 186
  SITE 2: note = 2-aminoisobutyric acid
  SITE 6: note = (S)-2-amino-3-(2-fluorophenyl)-2-methylpropanoic acid
  SITE 11: note = Alpha-methyl-L-serine
  SITE 13: note = Alpha-methyl-L-leucine
  SITE 16: note = Ornithine
  SITE 17: note = Lysine is chemically modified through conjugation of the side chain with (2-[2-(2-amino-ethoxy)-ethoxy]-acetyl)2-Gamma-Glutamic acid-CO-(CH2)16-CO2H
  SITE 20: note = Alpha-methyl-L-3-(4-pyridyl)-L-alanine
  SITE 21: note = Ornithine
  SITE 25: note = Alpha-methyl-L-tyrosine
  SITE 29: note = 2-aminoisobutyric acid

SEQ ID NO: 459 - protein, 40 aa, synthetic construct
  SITE 2: note = 2-aminoisobutyric acid
  SITE 6: note = (S)-2-amino-3-(2-fluorophenyl)-2-methylpropanoic acid
  SITE 10: note = 3-(4-pyridyl)-L-alanine
  SITE 13: note = Alpha-methyl-L-leucine
  SITE 17: note = Lysine is chemically modified through conjugation of the side chain with (2-[2-(2-amino-ethoxy)-ethoxy]-acetyl)2-Gamma-Glutamic acid-CO-(CH2)16-CO2H
  SITE 20: note = 2-aminoisobutyric acid
  SITE 24: note = D-Glutamic acid
  SITE 25: note = Alpha-methyl-L-tyrosine
  SITE 40: note = Lysine amide is chemically modified through conjugation of the side chain with 24x Polyethylene glycol-(6S,16S)-6,16-bis(aminomethyl)-4,7,15,18-tetraoxo-11 -(4-oxobutanoyl)-5,8,11,14,17-pentaazahenicosanedioic acid (BEA-MalDap2) which is attached to two Fc sequences
YXEGTXTSDXSIXLDEKAQXEFIEXLIEGSPSSGAPPPSK

SEQ ID NO: 460 - protein, 40 aa, synthetic construct
  SITE 2: note = 2-aminoisobutyric acid
  SITE 6: note = (S)-2-amino-3-(2-fluorophenyl)-2-methylpropanoic acid
  SITE 10: note = 3-(4-pyridyl)-L-alanine
  SITE 13: note = Alpha-methyl-L-leucine
  SITE 16: note = Ornithine
  SITE 17: note = Lysine is chemically modified through conjugation of the side chain with (2-[2-(2-amino-ethoxy)-ethoxy]-acetyl)2-Gamma-Glutamic acid-CO-(CH2)16-CO2H
  SITE 20: note = 2-aminoisobutyric acid
  SITE 24: note = D-Glutamic acid
  SITE 25: note = Alpha-methyl-L-tyrosine
  SITE 40: note = Lysine amide is chemically modified through conjugation of the side chain with 24x Polyethylene glycol-(6S,16S)-6,16-bis(aminomethyl)-4,7,15,18-tetraoxo-11 -(4-oxobutanoyl)-5,8,11,14,17-pentaazahenicosanedioic acid (BEA-MalDap2) which is attached to two Fc sequences
YXEGTXTSDXSIXLDXKAQXEFIEXLIEGSPSSGAPPPSK

SEQ ID NO: 461 - protein, 47 aa, synthetic construct
  SITE 2: note = 2-aminoisobutyric acid
  SITE 6: note = (S)-2-amino-3-(2-fluorophenyl)-2-methylpropanoic acid
  SITE 10: note = 3-(4-pyridyl)-L-alanine
  SITE 13: note = Alpha-methyl-L-leucine
  SITE 17: note = Lysine is chemically modified through conjugation of the side chain with (2-[2-(2-amino-ethoxy)-ethoxy]-acetyl)2-Gamma-Glutamic acid-CO-(CH2)16-CO2H
  SITE 20: note = 2-aminoisobutyric acid
  SITE 24: note = D-Glutamic acid
  SITE 25: note = Alpha-methyl-L-tyrosine
  SITE 47: note = Lysine amide is chemically modified through conjugation of the side chain with (6S,16S)-6,16-bis(aminomethyl)-4,7,15,18-tetraoxo-11-(4-oxo butanoyl)-5,8,11,14,17-pentaazahenicosanedioic acid (BEA-MalDap2) which is attached to two Fc sequences
YXEGTXTSDXSIXLDEKAQXEFIEXLIEGGGGGGGSGGGGSGGGGSK

SEQ ID NO: 462 - protein, 45 aa, synthetic construct
  SITE 2: note = 2-aminoisobutyric acid
  SITE 6: note = (S)-2-amino-3-(2-fluorophenyl)-2-methylpropanoic acid
  SITE 10: note = 3-(4-pyridyl)-L-alanine
  SITE 13: note = Alpha-methyl-L-leucine
  SITE 17: note = Lysine is chemically modified through conjugation of the side chain with (2-[2-(2-amino-ethoxy)-ethoxy]-acetyl)2-Gamma-Glutamic acid-CO-(CH2)16-CO2H
  SITE 20: note = 2-aminoisobutyric acid
  SITE 24: note = D-Glutamic acid
  SITE 25: note = Alpha-methyl-L-tyrosine
  SITE 45: note = Lysine amide is chemically modified through conjugation of the side chain with (6S,16S)-6,16-bis(aminomethyl)-4,7,15,18-tetraoxo-11-(4-oxo butanoyl)-5,8,11,14,17-pentaazahenicosanedioic acid (BEA-MalDap2) which is attached to two Fc sequences
YXEGTXTSDXSIXLDEKAQXEFIEXLIEGSPSSGAPPPSGGGGSK

SEQ ID NO: 463 - protein, 48 aa, synthetic construct
  SITE 2: note = 2-aminoisobutyric acid
  SITE 6: note = (S)-2-amino-3-(2-fluorophenyl)-2-methylpropanoic acid
  SITE 10: note = 3-(4-pyridyl)-L-alanine
  SITE 13: note = Alpha-methyl-L-leucine
  SITE 17: note = Lysine is chemically modified through conjugation of the side chain with (2-[2-(2-amino-ethoxy)-ethoxy]-acetyl)2-Gamma-Glutamic acid-CO-(CH2)16-CO2H
  SITE 20: note = 2-aminoisobutyric acid
  SITE 24: note = D-Glutamic acid
  SITE 25: note = Alpha-methyl-L-tyrosine
  SITE 40: note = 2-[2-(2-amino-ethoxy)-ethoxy]-acetyl
  SITE 41: note = 2-[2-(2-amino-ethoxy)-ethoxy]-acetyl
  SITE 42: note = 2-[2-(2-amino-ethoxy)-ethoxy]-acetyl
  SITE 43: note = 2-[2-(2-amino-ethoxy)-ethoxy]-acetyl
  SITE 44: note = 2-[2-(2-amino-ethoxy)-ethoxy]-acetyl
  SITE 45: note = 2-[2-(2-amino-ethoxy)-ethoxy]-acetyl
  SITE 46: note = 2-[2-(2-amino-ethoxy)-ethoxy]-acetyl
  SITE 47: note = 2-[2-(2-amino-ethoxy)-ethoxy]-acetyl
  SITE 48: note = Lysine amide is chemically modified through conjugation of the side chain with (6S,16S)-6,16-bis(aminomethyl)-4,7,15,18-tetraoxo-11-(4-oxo butanoyl)-5,8,11,14,17-pentaazahenicosanedioic acid (BEA-MalDap2) which is attached to two Fc sequences
YXEGTXTSDXSIXLDEKAQXEFIEXLIEGSPSSGAPPPSXXXXXXXXK

SEQ ID NO: 464 - protein, 44 aa, synthetic construct
  SITE 2: note = 2-aminoisobutyric acid
  SITE 6: note = (S)-2-amino-3-(2-fluorophenyl)-2-methylpropanoic acid
  SITE 10: note = 3-(4-pyridyl)-L-alanine
  SITE 13: note = Alpha-methyl-L-leucine
  SITE 17: note = Lysine is chemically modified through conjugation of the side chain with (2-[2-(2-amino-ethoxy)-ethoxy]-acetyl)2-Gamma-Glutamic acid-CO-(CH2)16-CO2H
  SITE 20: note = 2-aminoisobutyric acid
  SITE 24: note = D-Glutamic acid
  SITE 25: note = Alpha-methyl-L-tyrosine
  SITE 40: note = 2-[2-(2-amino-ethoxy)-ethoxy]-acetyl
  SITE 41: note = 2-[2-(2-amino-ethoxy)-ethoxy]-acetyl
  SITE 42: note = 2-[2-(2-amino-ethoxy)-ethoxy]-acetyl
  SITE 43: note = 2-[2-(2-amino-ethoxy)-ethoxy]-acetyl
  SITE 44: note = Lysine amide is chemically modified through conjugation of the side chain with (6S,16S)-6,16-bis(aminomethyl)-4,7,15,18-tetraoxo-11-(4-oxo butanoyl)-5,8,11,14,17-pentaazahenicosanedioic acid (BEA-MalDap2) which is attached to two Fc sequences
YXEGTXTSDXSIXLDEKAQXEFIEXLIEGSPSSGAPPPSXXXXK

SEQ ID NO: 465 - protein, 39 aa, synthetic construct; identical to SEQ ID NO: 1
  SITE 2: note = 2-aminoisobutyric acid
  SITE 6: note = (S)-2-amino-3-(2-fluorophenyl)-2-methylpropanoic acid
  SITE 10: note = 3-(4-pyridyl)-L-alanine
  SITE 13: note = Alpha-methyl-L-leucine
  SITE 17: note = Lysine is chemically modified through conjugation of the side chain with (2-[2-(2-amino-ethoxy)-ethoxy]-acetyl)2-Gamma-Glutamic acid-CO-(CH2)16-CO2H
  SITE 20: note = 2-aminoisobutyric acid
  SITE 24: note = D-Glutamic acid
  SITE 25: note = Alpha-methyl-L-tyrosine
  SITE 39: note = Residue attached via 24x polyethylene glycol to lysine amide chemically modified through conjugation of the side chain with (6S,16S)-6,16-bis(aminomethyl)-4,7,15,18-tetraoxo-11-(4-oxo butanoyl)-5,8,11,14,17-pentaazahenicosanedioic acid (BEA-MalDap2) which is attached to two Fc sequences

SEQ ID NO: 466 - protein, 40 aa, synthetic construct; identical to SEQ ID NO: 459
  SITE 2: note = 2-aminoisobutyric acid
  SITE 6: note = (S)-2-amino-3-(2-fluorophenyl)-2-methylpropanoic acid
  SITE 10: note = 3-(4-pyridyl)-L-alanine
  SITE 13: note = Alpha-methyl-L-leucine
  SITE 17: note = Lysine is chemically modified through conjugation of the side chain with (2-[2-(2-amino-ethoxy)-ethoxy]-acetyl)2-Gamma-Glutamic acid-CO-(CH2)16-CO2H
  SITE 20: note = 2-aminoisobutyric acid
  SITE 24: note = D-Glutamic acid
  SITE 25: note = Alpha-methyl-L-tyrosine
  SITE 40: note = Lysine amide is chemically modified through conjugation of the side chain with (2-[2-(2-amino-ethoxy)-ethoxy]-acetyl)4-(6S,16S)-6,16-bis(a minomethyl)-4,7,15,18-tetraoxo-11-(4-oxobutanoyl)-5,8,11,14 ,17-pentaazahenicosanedioic acid (BEA-MalDap2) which is attached to two Fc sequences

SEQ ID NO: 467 - protein, 40 aa, synthetic construct; identical to SEQ ID NO: 459
  SITE 2: note = 2-aminoisobutyric acid
  SITE 6: note = (S)-2-amino-3-(2-fluorophenyl)-2-methylpropanoic acid
  SITE 10: note = 3-(4-pyridyl)-L-alanine
  SITE 13: note = Alpha-methyl-L-leucine
  SITE 17: note = Lysine is chemically modified through conjugation of the side chain with (2-[2-(2-amino-ethoxy)-ethoxy]-acetyl)2-Gamma-Glutamic acid-CO-(CH2)16-CO2H
  SITE 20: note = 2-aminoisobutyric acid
  SITE 24: note = D-Glutamic acid
  SITE 25: note = Alpha-methyl-L-tyrosine
  SITE 40: note = Lysine amide is chemically modified through conjugation of the side chain with (2-[2-(2-amino-ethoxy)-ethoxy]-acetyl)4-GPAPAPAPAPAPA-(6S,1 6S)-6,16-bis(aminomethyl)-4,7,15,18-tetraoxo-11-(4-oxobutan oyl)-5,8,11,14,17-pentaazahenicosanedioic acid (BEA-MalDap2) which is attached to two Fc sequences

SEQ ID NO: 468 - protein, 40 aa, synthetic construct; identical to SEQ ID NO: 459
  SITE 2: note = 2-aminoisobutyric acid
  SITE 6: note = (S)-2-amino-3-(2-fluorophenyl)-2-methylpropanoic acid
  SITE 10: note = 3-(4-pyridyl)-L-alanine
  SITE 13: note = Alpha-methyl-L-leucine
  SITE 17: note = Lysine is chemically modified through conjugation of the side chain with (2-[2-(2-amino-ethoxy)-ethoxy]-acetyl)2-Gamma-Glutamic acid-CO-(CH2)16-CO2H
  SITE 20: note = 2-aminoisobutyric acid
  SITE 24: note = D-Glutamic acid
  SITE 25: note = Alpha-methyl-L-tyrosine
  SITE 40: note = Lysine amide is chemically modified through conjugation of the side chain with (2-[2-(2-amino-ethoxy)-ethoxy]-acetyl)6-GPAPAPAPAPAPA-(6S,1 6S)-6,16-bis(aminomethyl)-4,7,15,18-tetraoxo-11-(4-oxobutan oyl)-5,8,11,14,17-pentaazahenicosanedioic acid (BEA-MalDap2) which is attached to two Fc sequences

SEQ ID NO: 469 - protein, 40 aa, synthetic construct; identical to SEQ ID NO: 459
  SITE 2: note = 2-aminoisobutyric acid
  SITE 6: note = (S)-2-amino-3-(2-fluorophenyl)-2-methylpropanoic acid
  SITE 10: note = 3-(4-pyridyl)-L-alanine
  SITE 13: note = Alpha-methyl-L-leucine
  SITE 17: note = Lysine is chemically modified through conjugation of the side chain with (2-[2-(2-amino-ethoxy)-ethoxy]-acetyl)2-Gamma-Glutamic acid-CO-(CH2)16-CO2H
  SITE 20: note = 2-aminoisobutyric acid
  SITE 24: note = D-Glutamic acid
  SITE 25: note = Alpha-methyl-L-tyrosine
  SITE 40: note = Lysine amide is chemically modified through conjugation of the side chain with (2-[2-(2-amino-ethoxy)-ethoxy]-acetyl)4-GPAPAPAPAPAPAPAPA-( 6S,16S)-6,16-bis(aminomethyl)-4,7,15,18-tetraoxo-11-(4-oxob utanoyl)-5,8,11,14,17-pentaazahenicosanedioic acid (BEA-MalDap2) which is attached to two Fc sequences

SEQ ID NO: 470 - protein, 40 aa, synthetic construct; identical to SEQ ID NO: 459
  SITE 2: note = 2-aminoisobutyric acid
  SITE 6: note = (S)-2-amino-3-(2-fluorophenyl)-2-methylpropanoic acid
  SITE 10: note = 3-(4-pyridyl)-L-alanine
  SITE 13: note = Alpha-methyl-L-leucine
  SITE 17: note = Lysine is chemically modified through conjugation of the side chain with (2-[2-(2-amino-ethoxy)-ethoxy]-acetyl)2-Gamma-Glutamic acid-CO-(CH2)16-CO2H
  SITE 20: note = 2-aminoisobutyric acid
  SITE 24: note = D-Glutamic acid
  SITE 25: note = Alpha-methyl-L-tyrosine
  SITE 40: note = Lysine amide is chemically modified through conjugation of the side chain with GPAPAPAPAPAPAPAPA-(6S,16S)-6,16-bis(aminomethyl)-4,7,15,18- tetraoxo-11-(4-oxobutanoyl)-5,8,11,14,17-pentaazahenicosane dioic acid (BEA-MalDap2) which is attached to two Fc sequences

SEQ ID NO: 471 - protein, 40 aa, synthetic construct; identical to SEQ ID NO: 459
  SITE 2: note = 2-aminoisobutyric acid
  SITE 6: note = (S)-2-amino-3-(2-fluorophenyl)-2-methylpropanoic acid
  SITE 10: note = 3-(4-pyridyl)-L-alanine
  SITE 13: note = Alpha-methyl-L-leucine
  SITE 17: note = Lysine is chemically modified through conjugation of the side chain with (2-[2-(2-amino-ethoxy)-ethoxy]-acetyl)2-Gamma-Glutamic acid-CO-(CH2)16-CO2H
  SITE 20: note = 2-aminoisobutyric acid
  SITE 24: note = D-Glutamic acid
  SITE 25: note = Alpha-methyl-L-tyrosine
  SITE 40: note = Lysine amide is chemically modified through conjugation of the side chain with (2-[2-(2-amino-ethoxy)-ethoxy]-acetyl)4-GKAAAEKAAAEKAAAE-(6 S,16S)-6,16-bis(aminomethyl)-4,7,15,18-tetraoxo-11-(4-oxobu tanoyl)-5,8,11,14,17-pentaazahenicosanedioic acid (BEA-MalDap2) which is attached to two Fc sequences

SEQ ID NO: 472 - protein, 40 aa, synthetic construct; identical to SEQ ID NO: 459
  SITE 2: note = 2-aminoisobutyric acid
  SITE 6: note = (S)-2-amino-3-(2-fluorophenyl)-2-methylpropanoic acid
  SITE 10: note = 3-(4-pyridyl)-L-alanine
  SITE 13: note = Alpha-methyl-L-leucine
  SITE 17: note = Lysine is chemically modified through conjugation of the side chain with (2-[2-(2-amino-ethoxy)-ethoxy]-acetyl)2-Gamma-Glutamic acid-CO-(CH2)16-CO2H
  SITE 20: note = 2-aminoisobutyric acid
  SITE 24: note = D-Glutamic acid
  SITE 25: note = Alpha-methyl-L-tyrosine
  SITE 40: note = Lysine amide is chemically modified through conjugation of the side chain with LEAEAAAKEAAAKEAAAKEAAAKALE-(6S,16S)-6,16-bis(aminomethyl)-4 ,7,15,18-tetraoxo-11-(4-oxobutanoyl)-5,8,11,14,17-pentaazah enicosanedioic acid (BEA-MalDap2) which is attached to two Fc sequences

SEQ ID NO: 473 - protein, 40 aa, synthetic construct; identical to SEQ ID NO: 459
  SITE 2: note = 2-aminoisobutyric acid
  SITE 6: note = (S)-2-amino-3-(2-fluorophenyl)-2-methylpropanoic acid
  SITE 10: note = 3-(4-pyridyl)-L-alanine
  SITE 13: note = Alpha-methyl-L-leucine
  SITE 17: note = Lysine is chemically modified through conjugation of the side chain with (2-[2-(2-amino-ethoxy)-ethoxy]-acetyl)2-Gamma-Glutamic acid-CO-(CH2)16-CO2H
  SITE 20: note = 2-aminoisobutyric acid
  SITE 25: note = Alpha-methyl-L-tyrosine
  SITE 40: note = Lysine amide is chemically modified through conjugation of the side chain with 24x Polyethylene glycol-(6S,16S)-6,16-bis(aminomethyl)-4,7,15,18-tetraoxo-11 -(4-oxobutanoyl)-5,8,11,14,17-pentaazahenicosanedioic acid (BEA-MalDap2) which is attached to two Fc sequences

SEQ ID NO: 474 - protein, 40 aa, synthetic construct
  SITE 2: note = 2-aminoisobutyric acid
  SITE 6: note = (S)-2-amino-3-(2-fluorophenyl)-2-methylpropanoic acid
  SITE 10: note = 3-(4-pyridyl)-L-alanine
  SITE 11: note = 2-aminoisobutyric acid
  SITE 13: note = Alpha-methyl-L-leucine
  SITE 17: note = Lysine is chemically modified through conjugation of the side chain with (2-[2-(2-amino-ethoxy)-ethoxy]-acetyl)2-Gamma-Glutamic acid-CO-(CH2)16-CO2H
  SITE 20: note = 2-aminoisobutyric acid
  SITE 25: note = Alpha-methyl-L-tyrosine
  SITE 40: note = Lysine amide is chemically modified through conjugation of the side chain with 24x Polyethylene glycol-(6S,16S)-6,16-bis(aminomethyl)-4,7,15,18-tetraoxo-11 -(4-oxobutanoyl)-5,8,11,14,17-pentaazahenicosanedioic acid (BEA-MalDap2) which is attached to two Fc sequences
YXEGTXTSDXXIXLDEKAQXEFIEXLIEGSPSSGAPPPSK

SEQ ID NO: 475 - protein, 40 aa, synthetic construct
  SITE 2: note = 2-aminoisobutyric acid
  SITE 6: note = (S)-2-amino-3-(2-fluorophenyl)-2-methylpropanoic acid
  SITE 10: note = 3-(4-pyridyl)-L-alanine
  SITE 11: note = 2-aminoisobutyric acid
  SITE 13: note = Alpha-methyl-L-leucine
  SITE 17: note = Lysine is chemically modified through conjugation of the side chain with (2-[2-(2-amino-ethoxy)-ethoxy]-acetyl)2-Gamma-Glutamic acid-CO-(CH2)16-CO2H
  SITE 20: note = 2-aminoisobutyric acid
  SITE 25: note = Alpha-methyl-L-tyrosine
  SITE 40: note = Lysine amide is chemically modified through conjugation of the side chain with 24x Polyethylene glycol-(6S,16S)-6,16-bis(aminomethyl)-4,7,15,18-tetraoxo-11 -(4-oxobutanoyl)-5,8,11,14,17-pentaazahenicosanedioic acid (BEA-MalDap2) which is attached to two Fc sequences
YXEGTXTSDXXSXLDEKAQXEFIEXLIEGSPSSGAPPPSK

SEQ ID NO: 476 - protein, 40 aa, synthetic construct
  SITE 2: note = 2-aminoisobutyric acid
  SITE 6: note = (S)-2-amino-3-(2-fluorophenyl)-2-methylpropanoic acid
  SITE 10: note = 3-(4-pyridyl)-L-alanine
  SITE 13: note = Alpha-methyl-L-leucine
  SITE 17: note = Lysine is chemically modified through conjugation of the side chain with (2-[2-(2-amino-ethoxy)-ethoxy]-acetyl)2-Gamma-Glutamic acid-CO-(CH2)16-CO2H
  SITE 20: note = 2-aminoisobutyric acid
  SITE 25: note = Alpha-methyl-L-tyrosine
  SITE 40: note = Lysine amide is chemically modified through conjugation of the side chain with 24x Polyethylene glycol-(6S,16S)-6,16-bis(aminomethyl)-4,7,15,18-tetraoxo-11 -(4-oxobutanoyl)-5,8,11,14,17-pentaazahenicosanedioic acid (BEA-MalDap2) which is attached to two Fc sequences
YXEGTXTSDXSIXLEEKAQXEFIEXLIEGSPSSGAPPPSK

SEQ ID NO: 477 - protein, 40 aa, synthetic construct
  SITE 2: note = 2-aminoisobutyric acid
  SITE 6: note = (S)-2-amino-3-(2-fluorophenyl)-2-methylpropanoic acid
  SITE 11: note = 2-aminoisobutyric acid
  SITE 13: note = Alpha-methyl-L-leucine
  SITE 17: note = Lysine is chemically modified through conjugation of the side chain with (2-[2-(2-amino-ethoxy)-ethoxy]-acetyl)2-Gamma-Glutamic acid-CO-(CH2)16-CO2H
  SITE 20: note = 2-aminoisobutyric acid
  SITE 24: note = D-Glutamic acid
  SITE 25: note = Alpha-methyl-L-tyrosine
  SITE 40: note = Lysine amide is chemically modified through conjugation of the side chain with 24x Polyethylene glycol-(6S,16S)-6,16-bis(aminomethyl)-4,7,15,18-tetraoxo-11 -(4-oxobutanoyl)-5,8,11,14,17-pentaazahenicosanedioic acid (BEA-MalDap2) which is attached to two Fc sequences
YXEGTXTSDVXIXLDEKAQXEFIEXLIEGSPSSGAPPPSK

SEQ ID NO: 478 - protein, 40 aa, synthetic construct
  SITE 2: note = 2-aminoisobutyric acid
  SITE 6: note = (S)-2-amino-3-(2-fluorophenyl)-2-methylpropanoic acid
  SITE 11: note = 2-aminoisobutyric acid
  SITE 13: note = Alpha-methyl-L-leucine
  SITE 16: note = Ornithine
  SITE 17: note = Lysine is chemically modified through conjugation of the side chain with (2-[2-(2-amino-ethoxy)-ethoxy]-acetyl)2-Gamma-Glutamic acid-CO-(CH2)16-CO2H
  SITE 20: note = 2-aminoisobutyric acid
  SITE 24: note = D-Glutamic acid
  SITE 25: note = Alpha-methyl-L-tyrosine
  SITE 40: note = Lysine amide is chemically modified through conjugation of the side chain with 24x Polyethylene glycol-(6S,16S)-6,16-bis(aminomethyl)-4,7,15,18-tetraoxo-11 -(4-oxobutanoyl)-5,8,11,14,17-pentaazahenicosanedioic acid (BEA-MalDap2) which is attached to two Fc sequences
YXEGTXTSDVXIXLDXKAQXEFIEXLIEGSPSSGAPPPSK

SEQ ID NO: 479 - protein, 40 aa, synthetic construct; identical to SEQ ID NO: 478
  SITE 2: note = 2-aminoisobutyric acid
  SITE 6: note = (S)-2-amino-3-(2-fluorophenyl)-2-methylpropanoic acid
  SITE 11: note = 2-aminoisobutyric acid
  SITE 13: note = Alpha-methyl-L-leucine
  SITE 16: note = Ornithine
  SITE 17: note = Lysine is chemically modified through conjugation of the side chain with (2-[2-(2-amino-ethoxy)-ethoxy]-acetyl)2-Gamma-Glutamic acid-CO-(CH2)16-CO2H
  SITE 20: note = 2-aminoisobutyric acid
  SITE 25: note = Alpha-methyl-L-tyrosine
  SITE 40: note = Lysine amide is chemically modified through conjugation of the side chain with 24x Polyethylene glycol-(6S,16S)-6,16-bis(aminomethyl)-4,7,15,18-tetraoxo-11 -(4-oxobutanoyl)-5,8,11,14,17-pentaazahenicosanedioic acid (BEA-MalDap2) which is attached to two Fc sequences

SEQ ID NO: 480 - protein, 41 aa, synthetic construct; identical to SEQ ID NO: 11
  SITE 2: note = 2-aminoisobutyric acid
  SITE 6: note = (S)-2-amino-3-(2-fluorophenyl)-2-methylpropanoic acid
  SITE 10: note = 3-(4-pyridyl)-L-alanine
  SITE 13: note = Alpha-methyl-L-leucine
  SITE 17: note = Lysine is chemically modified through conjugation of the side chain with (2-[2-(2-amino-ethoxy)-ethoxy]-acetyl)2-Gamma-Glutamic acid-CO-(CH2)16-CO2H
  SITE 20: note = 2-aminoisobutyric acid
  SITE 24: note = Lysine is chemically modified through conjugation of the side chain with 24x Polyethylene glycol-(6S,16S)-6,16-bis(aminomethyl)-4,7,15,18-tetraoxo-11 -(4-oxobutanoyl)-5,8,11,14,17-pentaazahenicosanedioic acid (BEA-MalDap2) which is attached to two Fc sequences
  SITE 25: note = Alpha-methyl-L-tyrosine
  SITE 41: note = Amidated Serine

SEQ ID NO: 481 - protein, 41 aa, synthetic construct; identical to SEQ ID NO: 12
  SITE 2: note = 2-aminoisobutyric acid
  SITE 6: note = (S)-2-amino-3-(2-fluorophenyl)-2-methylpropanoic acid
  SITE 10: note = 3-(4-pyridyl)-L-alanine
  SITE 13: note = Alpha-methyl-L-leucine
  SITE 17: note = Lysine is chemically modified through conjugation of the side chain with (2-[2-(2-amino-ethoxy)-ethoxy]-acetyl)2-Gamma-Glutamic acid-CO-(CH2)16-CO2H
  SITE 20: note = 2-aminoisobutyric acid
  SITE 24: note = D-Glutamic acid
  SITE 25: note = Alpha-methyl-L-tyrosine
  SITE 28: note = Lysine is chemically modified through conjugation of the side chain with 24x Polyethylene glycol-(6S,16S)-6,16-bis(aminomethyl)-4,7,15,18-tetraoxo-11 -(4-oxobutanoyl)-5,8,11,14,17-pentaazahenicosanedioic acid (BEA-MalDap2) which is attached to two Fc sequences
  SITE 41: note = Amidated Serine

SEQ ID NO: 482 - protein, 52 aa, synthetic construct
  SITE 2: note = 2-aminoisobutyric acid
  SITE 6: note = (S)-2-amino-3-(2-fluorophenyl)-2-methylpropanoic acid
  SITE 10: note = 3-(4-pyridyl)-L-alanine
  SITE 13: note = Alpha-methyl-L-leucine
  SITE 17: note = Lysine is chemically modified through conjugation of the side chain with (2-[2-(2-amino-ethoxy)-ethoxy]-acetyl)2-Gamma-Glutamic acid-CO-(CH2)16-CO2H
  SITE 20: note = 2-aminoisobutyric acid
  SITE 24: note = D-Glutamic acid
  SITE 25: note = Alpha-methyl-L-tyrosine
  SITE 52: note = Lysine amide is chemically modified through conjugation of the side chain with (6S,16S)-6,16-bis(aminomethyl)-4,7,15,18-tetraoxo-11-(4-oxo butanoyl)-5,8,11,14,17-pentaazahenicosanedioic acid (BEA-MalDap2) which is attached to two Fc sequences
YXEGTXTSDXSIXLDEKAQXEFIEXLIEGGGGGGGSGGGGSGGGGSGGGGSK

SEQ ID NO: 483 - protein, 57 aa, synthetic construct
  SITE 2: note = 2-aminoisobutyric acid
  SITE 6: note = (S)-2-amino-3-(2-fluorophenyl)-2-methylpropanoic acid
  SITE 10: note = 3-(4-pyridyl)-L-alanine
  SITE 13: note = Alpha-methyl-L-leucine
  SITE 17: note = Lysine is chemically modified through conjugation of the side chain with (2-[2-(2-amino-ethoxy)-ethoxy]-acetyl)2-Gamma-Glutamic acid-CO-(CH2)16-CO2H
  SITE 20: note = 2-aminoisobutyric acid
  SITE 24: note = D-Glutamic acid
  SITE 25: note = Alpha-methyl-L-tyrosine
  SITE 57: note = Lysine amide is chemically modified through conjugation of the side chain with (6S,16S)-6,16-bis(aminomethyl)-4,7,15,18-tetraoxo-11-(4-oxo butanoyl)-5,8,11,14,17-pentaazahenicosanedioic acid (BEA-MalDap2) which is attached to two Fc sequences
YXEGTXTSDXSIXLDEKAQXEFIEXLIEGGGGGGGSGGGGSGGGGSGGGGSGGGGSK

SEQ ID NO: 484 - protein, 47 aa, synthetic construct
  SITE 2: note = 2-aminoisobutyric acid
  SITE 6: note = (S)-2-amino-3-(2-fluorophenyl)-2-methylpropanoic acid
  SITE 10: note = 3-(4-pyridyl)-L-alanine
  SITE 13: note = Alpha-methyl-L-leucine
  SITE 17: note = Lysine is chemically modified through conjugation of the side chain with (2-[2-(2-amino-ethoxy)-ethoxy]-acetyl)2-Gamma-Glutamic acid-CO-(CH2)16-CO2H
  SITE 20: note = 2-aminoisobutyric acid
  SITE 24: note = D-Glutamic acid
  SITE 25: note = Alpha-methyl-L-tyrosine
  SITE 47: note = Lysine amide is chemically modified through conjugation of the side chain with (6S,16S)-6,16-bis(aminomethyl)-4,7,15,18-tetraoxo-11-(4-oxo butanoyl)-5,8,11,14,17-pentaazahenicosanedioic acid (BEA-MalDap2) which is attached to two Fc sequences
YXEGTXTSDXSIXLDEKAQXEFIEXLIEGGPGGGGSGGGGSGGGGSK

SEQ ID NO: 485 - protein, 47 aa, synthetic construct
  SITE 2: note = 2-aminoisobutyric acid
  SITE 6: note = (S)-2-amino-3-(2-fluorophenyl)-2-methylpropanoic acid
  SITE 10: note = 3-(4-pyridyl)-L-alanine
  SITE 13: note = Alpha-methyl-L-leucine
  SITE 17: note = Lysine is chemically modified through conjugation of the side chain with (2-[2-(2-amino-ethoxy)-ethoxy]-acetyl)2-Gamma-Glutamic acid-CO-(CH2)16-CO2H
  SITE 20: note = 2-aminoisobutyric acid
  SITE 24: note = D-Glutamic acid
  SITE 25: note = Alpha-methyl-L-tyrosine
  SITE 47: note = Lysine amide is chemically modified through conjugation of the side chain with (6S,16S)-6,16-bis(aminomethyl)-4,7,15,18-tetraoxo-11-(4-oxo butanoyl)-5,8,11,14,17-pentaazahenicosanedioic acid (BEA-MalDap2) which is attached to two Fc sequences
YXEGTXTSDXSIXLDEKAQXEFIEXLIEGSPGGGGSGGGGSGGGGSK

SEQ ID NO: 486 - protein, 50 aa, synthetic construct
  SITE 2: note = 2-aminoisobutyric acid
  SITE 6: note = (S)-2-amino-3-(2-fluorophenyl)-2-methylpropanoic acid
  SITE 10: note = 3-(4-pyridyl)-L-alanine
  SITE 13: note = Alpha-methyl-L-leucine
  SITE 17: note = Lysine is chemically modified through conjugation of the side chain with (2-[2-(2-amino-ethoxy)-ethoxy]-acetyl)2-Gamma-Glutamic acid-CO-(CH2)16-CO2H
  SITE 20: note = 2-aminoisobutyric acid
  SITE 24: note = D-Glutamic acid
  SITE 25: note = Alpha-methyl-L-tyrosine
  SITE 50: note = Lysine amide is chemically modified through conjugation of the side chain with (6S,16S)-6,16-bis(aminomethyl)-4,7,15,18-tetraoxo-11-(4-oxo butanoyl)-5,8,11,14,17-pentaazahenicosanedioic acid (BEA-MalDap2) which is attached to two Fc sequences
YXEGTXTSDXSIXLDEKAQXEFIEXLIEGGGGGGGSGAPAPAPAPAPAPK

SEQ ID NO: 487 - protein, 55 aa, synthetic construct
  SITE 2: note = 2-aminoisobutyric acid
  SITE 6: note = (S)-2-amino-3-(2-fluorophenyl)-2-methylpropanoic acid
  SITE 10: note = 3-(4-pyridyl)-L-alanine
  SITE 13: note = Alpha-methyl-L-leucine
  SITE 17: note = Lysine is chemically modified through conjugation of the side chain with (2-[2-(2-amino-ethoxy)-ethoxy]-acetyl)2-Gamma-Glutamic acid-CO-(CH2)16-CO2H
  SITE 20: note = 2-aminoisobutyric acid
  SITE 24: note = D-Glutamic acid
  SITE 25: note = Alpha-methyl-L-tyrosine
  SITE 55: note = Lysine amide is chemically modified through conjugation of the side chain with (6S,16S)-6,16-bis(aminomethyl)-4,7,15,18-tetraoxo-11-(4-oxo butanoyl)-5,8,11,14,17-pentaazahenicosanedioic acid (BEA-MalDap2) which is attached to two Fc sequences
YXEGTXTSDXSIXLDEKAQXEFIEXLIEGGGGGGGSGGGGSGAPAPAPAPAPAPK

SEQ ID NO: 488 - protein, 53 aa, synthetic construct
  SITE 2: note = 2-aminoisobutyric acid
  SITE 6: note = (S)-2-amino-3-(2-fluorophenyl)-2-methylpropanoic acid
  SITE 10: note = 3-(4-pyridyl)-L-alanine
  SITE 13: note = Alpha-methyl-L-leucine
  SITE 17: note = Lysine is chemically modified through conjugation of the side chain with (2-[2-(2-amino-ethoxy)-ethoxy]-acetyl)2-Gamma-Glutamic acid-CO-(CH2)16-CO2H
  SITE 20: note = 2-aminoisobutyric acid
  SITE 24: note = D-Glutamic acid
  SITE 25: note = Alpha-methyl-L-tyrosine
  SITE 53: note = Lysine amide is chemically modified through conjugation of the side chain with (6S,16S)-6,16-bis(aminomethyl)-4,7,15,18-tetraoxo-11-(4-oxo butanoyl)-5,8,11,14,17-pentaazahenicosanedioic acid (BEA-MalDap2) which is attached to two Fc sequences
YXEGTXTSDXSIXLDEKAQXEFIEXLIEGGGGGGGSGEAAAKEAAAKEAAAKK

SEQ ID NO: 489 - protein, 58 aa, synthetic construct
  SITE 2: note = 2-aminoisobutyric acid
  SITE 6: note = (S)-2-amino-3-(2-fluorophenyl)-2-methylpropanoic acid
  SITE 10: note = 3-(4-pyridyl)-L-alanine
  SITE 13: note = Alpha-methyl-L-leucine
  SITE 17: note = Lysine is chemically modified through conjugation of the side chain with (2-[2-(2-amino-ethoxy)-ethoxy]-acetyl)2-Gamma-Glutamic acid-CO-(CH2)16-CO2H
  SITE 20: note = 2-aminoisobutyric acid
  SITE 24: note = D-Glutamic acid
  SITE 25: note = Alpha-methyl-L-tyrosine
  SITE 58: note = Lysine amide is chemically modified through conjugation of the side chain with (6S,16S)-6,16-bis(aminomethyl)-4,7,15,18-tetraoxo-11-(4-oxo butanoyl)-5,8,11,14,17-pentaazahenicosanedioic acid (BEA-MalDap2) which is attached to two Fc sequences
YXEGTXTSDXSIXLDEKAQXEFIEXLIEGGGGGGGSGGGGSGEAAAKEAAAKEAAAKK

SEQ ID NO: 490 - protein, 40 aa, synthetic construct; identical to SEQ ID NO: 460
  SITE 2: note = 2-aminoisobutyric acid
  SITE 6: note = (S)-2-amino-3-(2-fluorophenyl)-2-methylpropanoic acid
  SITE 10: note = 3-(4-pyridyl)-L-alanine
  SITE 13: note = Alpha-methyl-L-leucine
  SITE 16: note = Ornithine
  SITE 17: note = Lysine is chemically modified through conjugation of the side chain with epsilon-Lysine-epsilon-Lysine-Gamma-Glutamic acid-CO-(CH2)16-CO2H
  SITE 20: note = 2-aminoisobutyric acid
  SITE 24: note = D-Glutamic acid
  SITE 25: note = Alpha-methyl-L-tyrosine
  SITE 40: note = Lysine amide is chemically modified through conjugation of the side chain with 24x Polyethylene glycol-(6S,16S)-6,16-bis(aminomethyl)-4,7,15,18-tetraoxo-11 -(4-oxobutanoyl)-5,8,11,14,17-pentaazahenicosanedioic acid (BEA-MalDap2) which is attached to two Fc sequences

SEQ ID NO: 491 - protein, 40 aa, synthetic construct; identical to SEQ ID NO: 459
  SITE 2: note = 2-aminoisobutyric acid
  SITE 6: note = (S)-2-amino-3-(2-fluorophenyl)-2-methylpropanoic acid
  SITE 10: note = 3-(4-pyridyl)-L-alanine
  SITE 13: note = Alpha-methyl-L-leucine
  SITE 17: note = Lysine is chemically modified through conjugation of the side chain with epsilon-Lysine-epsilon-Lysine-Gamma-Glutamic acid-CO-(CH2)16-CO2H
  SITE 20: note = 2-aminoisobutyric acid
  SITE 24: note = D-Glutamic acid
  SITE 25: note = Alpha-methyl-L-tyrosine
  SITE 40: note = Lysine amide is chemically modified through conjugation of the side chain with 24x Polyethylene glycol-(6S,16S)-6,16-bis(aminomethyl)-4,7,15,18-tetraoxo-11 -(4-oxobutanoyl)-5,8,11,14,17-pentaazahenicosanedioic acid (BEA-MalDap2) which is attached to two Fc sequences

SEQ ID NO: 492 - protein, 46 aa, synthetic construct
  SITE 2: note = 2-aminoisobutyric acid
  SITE 6: note = (S)-2-amino-3-(2-fluorophenyl)-2-methylpropanoic acid
  SITE 10: note = 3-(4-pyridyl)-L-alanine
  SITE 13: note = Alpha-methyl-L-leucine
  SITE 17: note = Lysine is chemically modified through conjugation of the side chain with (2-[2-(2-amino-ethoxy)-ethoxy]-acetyl)2-Gamma-Glutamic acid-CO-(CH2)16-CO2H
  SITE 20: note = 2-aminoisobutyric acid
  SITE 24: note = D-Glutamic acid
  SITE 25: note = Alpha-methyl-L-tyrosine
  SITE 46: note = Lysine amide is chemically modified through conjugation of the side chain with (6S,16S)-6,16-bis(aminomethyl)-4,7,15,18-tetraoxo-11-(4-oxo butanoyl)-5,8,11,14,17-pentaazahenicosanedioic acid (BEA-MalDap2) which is attached to two Fc sequences
YXEGTXTSDXSIXLDEKAQXEFIEXLIEGGGGGGGSGAPAPAPAPK

SEQ ID NO: 493 - protein, 54 aa, synthetic construct
  SITE 2: note = 2-aminoisobutyric acid
  SITE 6: note = (S)-2-amino-3-(2-fluorophenyl)-2-methylpropanoic acid
  SITE 10: note = 3-(4-pyridyl)-L-alanine
  SITE 13: note = Alpha-methyl-L-leucine
  SITE 17: note = Lysine is chemically modified through conjugation of the side chain with (2-[2-(2-amino-ethoxy)-ethoxy]-acetyl)2-Gamma-Glutamic acid-CO-(CH2)16-CO2H
  SITE 20: note = 2-aminoisobutyric acid
  SITE 24: note = D-Glutamic acid
  SITE 25: note = Alpha-methyl-L-tyrosine
  SITE 54: note = Lysine amide is chemically modified through conjugation of the side chain with (6S,16S)-6,16-bis(aminomethyl)-4,7,15,18-tetraoxo-11-(4-oxo butanoyl)-5,8,11,14,17-pentaazahenicosanedioic acid (BEA-MalDap2) which is attached to two Fc sequences
YXEGTXTSDXSIXLDEKAQXEFIEXLIEGGGGGGGSGGGGSGGGGSGAPAPAPK

SEQ ID NO: 494 - protein, 59 aa, synthetic construct
  SITE 2: note = 2-aminoisobutyric acid
  SITE 6: note = (S)-2-amino-3-(2-fluorophenyl)-2-methylpropanoic acid
  SITE 10: note = 3-(4-pyridyl)-L-alanine
  SITE 13: note = Alpha-methyl-L-leucine
  SITE 17: note = Lysine is chemically modified through conjugation of the side chain with (2-[2-(2-amino-ethoxy)-ethoxy]-acetyl)2-Gamma-Glutamic acid-CO-(CH2)16-CO2H
  SITE 20: note = 2-aminoisobutyric acid
  SITE 24: note = D-Glutamic acid
  SITE 25: note = Alpha-methyl-L-tyrosine
  SITE 59: note = Lysine amide is chemically modified through conjugation of the side chain with (6S,16S)-6,16-bis(aminomethyl)-4,7,15,18-tetraoxo-11-(4-oxo butanoyl)-5,8,11,14,17-pentaazahenicosanedioic acid (BEA-MalDap2) which is attached to two Fc sequences
YXEGTXTSDXSIXLDEKAQXEFIEXLIEGGGGGGGSGGGGSGGGGSGGGGSGAPAPAPK

SEQ ID NO: 495 - protein, 62 aa, synthetic construct
  SITE 2: note = 2-aminoisobutyric acid
  SITE 6: note = (S)-2-amino-3-(2-fluorophenyl)-2-methylpropanoic acid
  SITE 10: note = 3-(4-pyridyl)-L-alanine
  SITE 13: note = Alpha-methyl-L-leucine
  SITE 17: note = Lysine is chemically modified through conjugation of the side chain with (2-[2-(2-amino-ethoxy)-ethoxy]-acetyl)2-Gamma-Glutamic acid-CO-(CH2)16-CO2H
  SITE 20: note = 2-aminoisobutyric acid
  SITE 24: note = D-Glutamic acid
  SITE 25: note = Alpha-methyl-L-tyrosine
  SITE 62: note = Lysine amide is chemically modified through conjugation of the side chain with (6S,16S)-6,16-bis(aminomethyl)-4,7,15,18-tetraoxo-11-(4-oxo butanoyl)-5,8,11,14,17-pentaazahenicosanedioic acid (BEA-MalDap2) which is attached to two Fc sequences
YXEGTXTSDXSIXLDEKAQXEFIEXLIEGGGGGGGSGGGGSEAAAKEAAAKEAAAKEAAAKK

SEQ ID NO: 496 - protein, 63 aa, synthetic construct
  SITE 2: note = 2-aminoisobutyric acid
  SITE 6: note = (S)-2-amino-3-(2-fluorophenyl)-2-methylpropanoic acid
  SITE 10: note = 3-(4-pyridyl)-L-alanine
  SITE 13: note = Alpha-methyl-L-leucine
  SITE 17: note = Lysine is chemically modified through conjugation of the side chain with (2-[2-(2-amino-ethoxy)-ethoxy]-acetyl)2-Gamma-Glutamic acid-CO-(CH2)16-CO2H
  SITE 20: note = 2-aminoisobutyric acid
  SITE 24: note = D-Glutamic acid
  SITE 25: note = Alpha-methyl-L-tyrosine
  SITE 63: note = Lysine amide is chemically modified through conjugation of the side chain with (6S,16S)-6,16-bis(aminomethyl)-4,7,15,18-tetraoxo-11-(4-oxo butanoyl)-5,8,11,14,17-pentaazahenicosanedioic acid (BEA-MalDap2) which is attached to two Fc sequences
YXEGTXTSDXSIXLDEKAQXEFIEXLIEGGGGGGGSGGGGSGGGGSGEAAAKEAAAKEAAAKK

SEQ ID NO: 497 - protein, 68 aa, synthetic construct
  SITE 2: note = 2-aminoisobutyric acid
  SITE 6: note = (S)-2-amino-3-(2-fluorophenyl)-2-methylpropanoic acid
  SITE 10: note = 3-(4-pyridyl)-L-alanine
  SITE 13: note = Alpha-methyl-L-leucine
  SITE 17: note = Lysine is chemically modified through conjugation of the side chain with (2-[2-(2-amino-ethoxy)-ethoxy]-acetyl)2-Gamma-Glutamic acid-CO-(CH2)16-CO2H
  SITE 20: note = 2-aminoisobutyric acid
  SITE 24: note = D-Glutamic acid
  SITE 25: note = Alpha-methyl-L-tyrosine
  SITE 68: note = Lysine amide is chemically modified through conjugation of the side chain with (6S,16S)-6,16-bis(aminomethyl)-4,7,15,18-tetraoxo-11-(4-oxo butanoyl)-5,8,11,14,17-pentaazahenicosanedioic acid (BEA-MalDap2) which is attached to two Fc sequences
YXEGTXTSDXSIXLDEKAQXEFIEXLIEGGGGGGGSGGGGSGGGGSGGGGSGEAAAKEAAAKEAAAKK

SEQ ID NO: 498 - protein, 47 aa, synthetic construct; identical to SEQ ID NO: 461
  SITE 2: note = 2-aminoisobutyric acid
  SITE 6: note = (S)-2-amino-3-(2-fluorophenyl)-2-methylpropanoic acid
  SITE 10: note = 3-(4-pyridyl)-L-alanine
  SITE 13: note = Alpha-methyl-L-leucine
  SITE 17: note = Lysine is chemically modified through conjugation of the side chain with (2-[2-(2-amino-ethoxy)-ethoxy]-acetyl)2-Gamma-Glutamic acid-CO-(CH2)16-CO2H
  SITE 20: note = 2-aminoisobutyric acid
  SITE 25: note = Alpha-methyl-L-tyrosine
  SITE 47: note = Lysine amide is chemically modified through conjugation of the side chain with (6S,16S)-6,16-bis(aminomethyl)-4,7,15,18-tetraoxo-11-(4-oxo butanoyl)-5,8,11,14,17-pentaazahenicosanedioic acid (BEA-MalDap2) which is attached to two Fc sequences

SEQ ID NO: 499 - protein, 47 aa, synthetic construct
  SITE 2: note = 2-aminoisobutyric acid
  SITE 6: note = (S)-2-amino-3-(2-fluorophenyl)-2-methylpropanoic acid
  SITE 10: note = 3-(4-pyridyl)-L-alanine
  SITE 11: note = 2-aminoisobutyric acid
  SITE 13: note = Alpha-methyl-L-leucine
  SITE 17: note = Lysine is chemically modified through conjugation of the side chain with (2-[2-(2-amino-ethoxy)-ethoxy]-acetyl)2-Gamma-Glutamic acid-CO-(CH2)16-CO2H
  SITE 20: note = 2-aminoisobutyric acid
  SITE 25: note = Alpha-methyl-L-tyrosine
  SITE 47: note = Lysine amide is chemically modified through conjugation of the side chain with (6S,16S)-6,16-bis(aminomethyl)-4,7,15,18-tetraoxo-11-(4-oxo butanoyl)-5,8,11,14,17-pentaazahenicosanedioic acid (BEA-MalDap2) which is attached to two Fc sequences
YXEGTXTSDXXIXLDEKAQXEFIEXLIEGGGGGGGSGGGGSGGGGSK

SEQ ID NO: 500 - protein, 47 aa, synthetic construct
  SITE 2: note = 2-aminoisobutyric acid
  SITE 6: note = (S)-2-amino-3-(2-fluorophenyl)-2-methylpropanoic acid
  SITE 10: note = 3-(4-pyridyl)-L-alanine
  SITE 13: note = Alpha-methyl-L-leucine
  SITE 17: note = Lysine is chemically modified through conjugation of the side chain with (2-[2-(2-amino-ethoxy)-ethoxy]-acetyl)2-Gamma-Glutamic acid-CO-(CH2)16-CO2H
  SITE 20: note = 2-aminoisobutyric acid
  SITE 25: note = Alpha-methyl-L-tyrosine
  SITE 47: note = Lysine amide is chemically modified through conjugation of the side chain with (6S,16S)-6,16-bis(aminomethyl)-4,7,15,18-tetraoxo-11-(4-oxo butanoyl)-5,8,11,14,17-pentaazahenicosanedioic acid (BEA-MalDap2) which is attached to two Fc sequences
YXEGTXTSDXSIXLEEKAQXEFIEXLIEGGGGGGGSGGGGSGGGGSK

SEQ ID NO: 501 - protein, 47 aa, synthetic construct
  SITE 2: note = 2-aminoisobutyric acid
  SITE 6: note = (S)-2-amino-3-(2-fluorophenyl)-2-methylpropanoic acid
  SITE 11: note = 2-aminoisobutyric acid
  SITE 13: note = Alpha-methyl-L-leucine
  SITE 17: note = Lysine is chemically modified through conjugation of the side chain with (2-[2-(2-amino-ethoxy)-ethoxy]-acetyl)2-Gamma-Glutamic acid-CO-(CH2)16-CO2H
  SITE 20: note = 2-aminoisobutyric acid
  SITE 24: note = D-Glutamic acid
  SITE 25: note = Alpha-methyl-L-tyrosine
  SITE 47: note = Lysine amide is chemically modified through conjugation of the side chain with (6S,16S)-6,16-bis(aminomethyl)-4,7,15,18-tetraoxo-11-(4-oxo butanoyl)-5,8,11,14,17-pentaazahenicosanedioic acid (BEA-MalDap2) which is attached to two Fc sequences
YXEGTXTSDVXIXLDEKAQXEFIEXLIEGGGGGGGSGGGGSGGGGSK

SEQ ID NO: 502 - protein, 47 aa, synthetic construct
  SITE 2: note = 2-aminoisobutyric acid
  SITE 6: note = (S)-2-amino-3-(2-fluorophenyl)-2-methylpropanoic acid
  SITE 11: note = 2-aminoisobutyric acid
  SITE 13: note = Alpha-methyl-L-leucine
  SITE 16: note = Ornithine
  SITE 17: note = Lysine is chemically modified through conjugation of the side chain with (2-[2-(2-amino-ethoxy)-ethoxy]-acetyl)2-Gamma-Glutamic acid-CO-(CH2)16-CO2H
  SITE 20: note = 2-aminoisobutyric acid
  SITE 24: note = D-Glutamic acid
  SITE 25: note = Alpha-methyl-L-tyrosine
  SITE 47: note = Lysine amide is chemically modified through conjugation of the side chain with (6S,16S)-6,16-bis(aminomethyl)-4,7,15,18-tetraoxo-11-(4-oxo butanoyl)-5,8,11,14,17-pentaazahenicosanedioic acid (BEA-MalDap2) which is attached to two Fc sequences
YXEGTXTSDVXIXLDXKAQXEFIEXLIEGGGGGGGSGGGGSGGGGSK

SEQ ID NO: 503 - protein, 47 aa, synthetic construct; identical to SEQ ID NO: 502
  SITE 2: note = 2-aminoisobutyric acid
  SITE 6: note = (S)-2-amino-3-(2-fluorophenyl)-2-methylpropanoic acid
  SITE 11: note = 2-aminoisobutyric acid
  SITE 13: note = Alpha-methyl-L-leucine
  SITE 16: note = Ornithine
  SITE 17: note = Lysine is chemically modified through conjugation of the side chain with (2-[2-(2-amino-ethoxy)-ethoxy]-acetyl)2-Gamma-Glutamic acid-CO-(CH2)16-CO2H
  SITE 20: note = 2-aminoisobutyric acid
  SITE 25: note = Alpha-methyl-L-tyrosine
  SITE 47: note = Lysine amide is chemically modified through conjugation of the side chain with (6S,16S)-6,16-bis(aminomethyl)-4,7,15,18-tetraoxo-11-(4-oxo butanoyl)-5,8,11,14,17-pentaazahenicosanedioic acid (BEA-MalDap2) which is attached to two Fc sequences

SEQ ID NO: 504 - protein, 47 aa, synthetic construct
  SITE 2: note = 2-aminoisobutyric acid
  SITE 6: note = (S)-2-amino-3-(2-fluorophenyl)-2-methylpropanoic acid
  SITE 10: note = 3-(4-pyridyl)-L-alanine
  SITE 13: note = Alpha-methyl-L-leucine
  SITE 16: note = Ornithine
  SITE 17: note = Lysine is chemically modified through conjugation of the side chain with (2-[2-(2-amino-ethoxy)-ethoxy]-acetyl)2-Gamma-Glutamic acid-CO-(CH2)16-CO2H
  SITE 20: note = 2-aminoisobutyric acid
  SITE 25: note = Alpha-methyl-L-tyrosine
  SITE 47: note = Lysine amide is chemically modified through conjugation of the side chain with (6S,16S)-6,16-bis(aminomethyl)-4,7,15,18-tetraoxo-11-(4-oxo butanoyl)-5,8,11,14,17-pentaazahenicosanedioic acid (BEA-MalDap2) which is attached to two Fc sequences
YXEGTXTSDXSIXLDXKAQXEFIEXLIEGGGGGGGSGGGGSGGGGSK

SEQ ID NO: 505 - protein, 47 aa, synthetic construct
  SITE 2: note = 2-aminoisobutyric acid
  SITE 6: note = (S)-2-amino-3-(2-fluorophenyl)-2-methylpropanoic acid
  SITE 10: note = 3-(4-pyridyl)-L-alanine
  SITE 11: note = 2-aminoisobutyric acid
  SITE 13: note = Alpha-methyl-L-leucine
  SITE 16: note = Ornithine
  SITE 17: note = Lysine is chemically modified through conjugation of the side chain with (2-[2-(2-amino-ethoxy)-ethoxy]-acetyl)2-Gamma-Glutamic acid-CO-(CH2)16-CO2H
  SITE 20: note = 2-aminoisobutyric acid
  SITE 25: note = Alpha-methyl-L-tyrosine
  SITE 47: note = Lysine amide is chemically modified through conjugation of the side chain with (6S,16S)-6,16-bis(aminomethyl)-4,7,15,18-tetraoxo-11-(4-oxo butanoyl)-5,8,11,14,17-pentaazahenicosanedioic acid (BEA-MalDap2) which is attached to two Fc sequences
YXEGTXTSDXXIXLDXKAQXEFIEXLIEGGGGGGGSGGGGSGGGGSK

SEQ ID NO: 506 - protein, 47 aa, synthetic construct
  SITE 2: note = 2-aminoisobutyric acid
  SITE 6: note = (S)-2-amino-3-(2-fluorophenyl)-2-methylpropanoic acid
  SITE 10: note = 3-(4-pyridyl)-L-alanine
  SITE 13: note = Alpha-methyl-L-leucine
  SITE 16: note = Ornithine
  SITE 17: note = Lysine is chemically modified through conjugation of the side chain with (2-[2-(2-amino-ethoxy)-ethoxy]-acetyl)2-Gamma-Glutamic acid-CO-(CH2)16-CO2H
  SITE 20: note = 2-aminoisobutyric acid
  SITE 25: note = Alpha-methyl-L-tyrosine
  SITE 47: note = Lysine amide is chemically modified through conjugation of the side chain with (6S,16S)-6,16-bis(aminomethyl)-4,7,15,18-tetraoxo-11-(4-oxo butanoyl)-5,8,11,14,17-pentaazahenicosanedioic acid (BEA-MalDap2) which is attached to two Fc sequences
YXEGTXTSDXSIXLEXKAQXEFIEXLIEGGGGGGGSGGGGSGGGGSK

SEQ ID NO: 507 - protein, 59 aa, synthetic construct
  SITE 2: note = 2-aminoisobutyric acid
  SITE 6: note = (S)-2-amino-3-(2-fluorophenyl)-2-methylpropanoic acid
  SITE 10: note = 3-(4-pyridyl)-L-alanine
  SITE 13: note = Alpha-methyl-L-leucine
  SITE 17: note = Lysine is chemically modified through conjugation of the side chain with (2-[2-(2-amino-ethoxy)-ethoxy]-acetyl)2-Gamma-Glutamic acid-CO-(CH2)16-CO2H
  SITE 20: note = 2-aminoisobutyric acid
  SITE 24: note = D-Glutamic acid
  SITE 25: note = Alpha-methyl-L-tyrosine
  SITE 59: note = Lysine amide is chemically modified through conjugation of the side chain with (6S,16S)-6,16-bis(aminomethyl)-4,7,15,18-tetraoxo-11-(4-oxo butanoyl)-5,8,11,14,17-pentaazahenicosanedioic acid (BEA-MalDap2) which is attached to two Fc sequences
YXEGTXTSDXSIXLDEKAQXEFIEXLIEGGGGGGGSGGGGSGAPAPAPAPAPAPAPAPK

SEQ ID NO: 508 - protein, 60 aa, synthetic construct
  SITE 2: note = 2-aminoisobutyric acid
  SITE 6: note = (S)-2-amino-3-(2-fluorophenyl)-2-methylpropanoic acid
  SITE 10: note = 3-(4-pyridyl)-L-alanine
  SITE 13: note = Alpha-methyl-L-leucine
  SITE 17: note = Lysine is chemically modified through conjugation of the side chain with (2-[2-(2-amino-ethoxy)-ethoxy]-acetyl)2-Gamma-Glutamic acid-CO-(CH2)16-CO2H
  SITE 20: note = 2-aminoisobutyric acid
  SITE 24: note = D-Glutamic acid
  SITE 25: note = Alpha-methyl-L-tyrosine
  SITE 60: note = Lysine amide is chemically modified through conjugation of the side chain with (6S,16S)-6,16-bis(aminomethyl)-4,7,15,18-tetraoxo-11-(4-oxo butanoyl)-5,8,11,14,17-pentaazahenicosanedioic acid (BEA-MalDap2) which is attached to two Fc sequences
YXEGTXTSDXSIXLDEKAQXEFIEXLIEGGGGGGGSGGGGSGGGGSGAPAPAPAPAPAPK

SEQ ID NO: 509 - protein, 65 aa, synthetic construct
  SITE 2: note = 2-aminoisobutyric acid
  SITE 6: note = (S)-2-amino-3-(2-fluorophenyl)-2-methylpropanoic acid
  SITE 10: note = 3-(4-pyridyl)-L-alanine
  SITE 13: note = Alpha-methyl-L-leucine
  SITE 17: note = Lysine is chemically modified through conjugation of the side chain with (2-[2-(2-amino-ethoxy)-ethoxy]-acetyl)2-Gamma-Glutamic acid-CO-(CH2)16-CO2H
  SITE 20: note = 2-aminoisobutyric acid
  SITE 24: note = D-Glutamic acid
  SITE 25: note = Alpha-methyl-L-tyrosine
  SITE 65: note = Lysine amide is chemically modified through conjugation of the side chain with (6S,16S)-6,16-bis(aminomethyl)-4,7,15,18-tetraoxo-11-(4-oxo butanoyl)-5,8,11,14,17-pentaazahenicosanedioic acid (BEA-MalDap2) which is attached to two Fc sequences
YXEGTXTSDXSIXLDEKAQXEFIEXLIEGGGGGGGSGGGGSGGGGSGGGGSGAPAPAPAPAPAPK

SEQ ID NO: 510 - protein, 47 aa, synthetic construct
  SITE 2: note = 2-aminoisobutyric acid
  SITE 6: note = (S)-2-amino-3-(2-fluorophenyl)-2-methylpropanoic acid
  SITE 10: note = 3-(4-pyridyl)-L-alanine
  SITE 13: note = Alpha-methyl-L-leucine
  SITE 17: note = Lysine is chemically modified through conjugation of the side chain with (2-[2-(2-amino-ethoxy)-ethoxy]-acetyl)2-Gamma-Glutamic acid-CO-(CH2)16-CO2H
  SITE 20: note = 2-aminoisobutyric acid
  SITE 25: note = Alpha-methyl-L-tyrosine
  SITE 47: note = Lysine amide is chemically modified through conjugation of the side chain with (6S,16S)-6,16-bis(aminomethyl)-4,7,15,18-tetraoxo-11-(4-oxo butanoyl)-5,8,11,14,17-pentaazahenicosanedioic acid (BEA-MalDap2) which is attached to two Fc sequences
YXEGTXTSDXSIXLDEKAQXEFIEXLIEGGGGGGGQGGGGQGGGGQK

SEQ ID NO: 511 - protein, 52 aa, synthetic construct
  SITE 2: note = 2-aminoisobutyric acid
  SITE 6: note = (S)-2-amino-3-(2-fluorophenyl)-2-methylpropanoic acid
  SITE 10: note = 3-(4-pyridyl)-L-alanine
  SITE 13: note = Alpha-methyl-L-leucine
  SITE 17: note = Lysine is chemically modified through conjugation of the side chain with (2-[2-(2-amino-ethoxy)-ethoxy]-acetyl)2-Gamma-Glutamic acid-CO-(CH2)16-CO2H
  SITE 20: note = 2-aminoisobutyric acid
  SITE 25: note = Alpha-methyl-L-tyrosine
  SITE 52: note = Lysine amide is chemically modified through conjugation of the side chain with (6S,16S)-6,16-bis(aminomethyl)-4,7,15,18-tetraoxo-11-(4-oxo butanoyl)-5,8,11,14,17-pentaazahenicosanedioic acid (BEA-MalDap2) which is attached to two Fc sequences
YXEGTXTSDXSIXLDEKAQXEFIEXLIEGGGGGGGQGGGGQGGGGQGGGGQK

SEQ ID NO: 512 - protein, 57 aa, synthetic construct
  SITE 2: note = 2-aminoisobutyric acid
  SITE 6: note = (S)-2-amino-3-(2-fluorophenyl)-2-methylpropanoic acid
  SITE 10: note = 3-(4-pyridyl)-L-alanine
  SITE 13: note = Alpha-methyl-L-leucine
  SITE 17: note = Lysine is chemically modified through conjugation of the side chain with (2-[2-(2-amino-ethoxy)-ethoxy]-acetyl)2-Gamma-Glutamic acid-CO-(CH2)16-CO2H
  SITE 20: note = 2-aminoisobutyric acid
  SITE 25: note = Alpha-methyl-L-tyrosine
  SITE 57: note = Lysine amide is chemically modified through conjugation of the side chain with (6S,16S)-6,16-bis(aminomethyl)-4,7,15,18-tetraoxo-11-(4-oxo butanoyl)-5,8,11,14,17-pentaazahenicosanedioic acid (BEA-MalDap2) which is attached to two Fc sequences
YXEGTXTSDXSIXLDEKAQXEFIEXLIEGGGGGGGQGGGGQGGGGQGGGGQGGGGQK

SEQ ID NO: 513 - protein, 41 aa, synthetic construct; identical to SEQ ID NO: 11
  SITE 2: note = 2-aminoisobutyric acid
  SITE 6: note = (S)-2-amino-3-(2-fluorophenyl)-2-methylpropanoic acid
  SITE 10: note = 3-(4-pyridyl)-L-alanine
  SITE 13: note = Alpha-methyl-L-leucine
  SITE 17: note = Lysine is chemically modified through conjugation of the side chain with (2-[2-(2-amino-ethoxy)-ethoxy]-acetyl)2-Gamma-Glutamic acid-CO-(CH2)16-CO2H
  SITE 20: note = 2-aminoisobutyric acid
  SITE 24: note = Lysine is chemically modified through conjugation of the side chain with (2-[2-(2-amino-ethoxy)-ethoxy]-acetyl)4-(6S,16S)-6,16-bis(a minomethyl)-4,7,15,18-tetraoxo-11-(4-oxobutanoyl)-5,8,11,14 ,17-pentaazahenicosanedioic acid (BEA-MalDap2) which is attached to two Fc sequences
  SITE 25: note = Alpha-methyl-L-tyrosine
  SITE 41: note = Amidated Serine

SEQ ID NO: 514 - protein, 41 aa, synthetic construct; identical to SEQ ID NO: 12
  SITE 2: note = 2-aminoisobutyric acid
  SITE 6: note = (S)-2-amino-3-(2-fluorophenyl)-2-methylpropanoic acid
  SITE 10: note = 3-(4-pyridyl)-L-alanine
  SITE 13: note = Alpha-methyl-L-leucine
  SITE 17: note = Lysine is chemically modified through conjugation of the side chain with (2-[2-(2-amino-ethoxy)-ethoxy]-acetyl)2-Gamma-Glutamic acid-CO-(CH2)16-CO2H
  SITE 20: note = 2-aminoisobutyric acid
  SITE 25: note = Alpha-methyl-L-tyrosine
  SITE 28: note = Lysine is chemically modified through conjugation of the side chain with (2-[2-(2-amino-ethoxy)-ethoxy]-acetyl)4-(6S,16S)-6,16-bis(a minomethyl)-4,7,15,18-tetraoxo-11-(4-oxobutanoyl)-5,8,11,14 ,17-pentaazahenicosanedioic acid (BEA-MalDap2) which is attached to two Fc sequences
  SITE 41: note = Amidated Serine

SEQ ID NO: 515 - protein, 41 aa, synthetic construct; identical to SEQ ID NO: 12
  SITE 2: note = 2-aminoisobutyric acid
  SITE 6: note = (S)-2-amino-3-(2-fluorophenyl)-2-methylpropanoic acid
  SITE 10: note = 3-(4-pyridyl)-L-alanine
  SITE 13: note = Alpha-methyl-L-leucine
  SITE 17: note = Lysine is chemically modified through conjugation of the side chain with (2-[2-(2-amino-ethoxy)-ethoxy]-acetyl)2-Gamma-Glutamic acid-CO-(CH2)16-CO2H
  SITE 20: note = 2-aminoisobutyric acid
  SITE 25: note = Alpha-methyl-L-tyrosine
  SITE 28: note = Lysine is chemically modified through conjugation of the side chain with GGGGSGGGGSGGGGSGGGGSG-(6S,16S)-6,16-bis(aminomethyl)-4,7,15 ,18-tetraoxo-11-(4-oxobutanoyl)-5,8,11,14,17-pentaazahenico sanedioic acid (BEA-MalDap2) which is attached to two Fc sequences
  SITE 41: note = Amidated Serine

SEQ ID NO: 516 - protein, 50 aa, synthetic construct; identical to SEQ ID NO: 486
  SITE 2: note = 2-aminoisobutyric acid
  SITE 6: note = (S)-2-amino-3-(2-fluorophenyl)-2-methylpropanoic acid
  SITE 10: note = 3-(4-pyridyl)-L-alanine
  SITE 13: note = Alpha-methyl-L-leucine
  SITE 17: note = Lysine is chemically modified through conjugation of the side chain with (2-[2-(2-amino-ethoxy)-ethoxy]-acetyl)2-Gamma-Glutamic acid-CO-(CH2)16-CO2H
  SITE 20: note = 2-aminoisobutyric acid
  SITE 25: note = Alpha-methyl-L-tyrosine
  SITE 50: note = Lysine amide is chemically modified through conjugation of the side chain with (6S,16S)-6,16-bis(aminomethyl)-4,7,15,18-tetraoxo-11-(4-oxo butanoyl)-5,8,11,14,17-pentaazahenicosanedioic acid (BEA-MalDap2) which is attached to two Fc sequences

SEQ ID NO: 517 - protein, 60 aa, synthetic construct; identical to SEQ ID NO: 508
  SITE 2: note = 2-aminoisobutyric acid
  SITE 6: note = (S)-2-amino-3-(2-fluorophenyl)-2-methylpropanoic acid
  SITE 10: note = 3-(4-pyridyl)-L-alanine
  SITE 13: note = Alpha-methyl-L-leucine
  SITE 17: note = Lysine is chemically modified through conjugation of the side chain with (2-[2-(2-amino-ethoxy)-ethoxy]-acetyl)2-Gamma-Glutamic acid-CO-(CH2)16-CO2H
  SITE 20: note = 2-aminoisobutyric acid
  SITE 25: note = Alpha-methyl-L-tyrosine
  SITE 60: note = Lysine amide is chemically modified through conjugation of the side chain with (6S,16S)-6,16-bis(aminomethyl)-4,7,15,18-tetraoxo-11-(4-oxo butanoyl)-5,8,11,14,17-pentaazahenicosanedioic acid (BEA-MalDap2) which is attached to two Fc sequences

SEQ ID NO: 518 - protein, 53 aa, synthetic construct; identical to SEQ ID NO: 488
  SITE 2: note = 2-aminoisobutyric acid
  SITE 6: note = (S)-2-amino-3-(2-fluorophenyl)-2-methylpropanoic acid
  SITE 10: note = 3-(4-pyridyl)-L-alanine
  SITE 13: note = Alpha-methyl-L-leucine
  SITE 17: note = Lysine is chemically modified through conjugation of the side chain with (2-[2-(2-amino-ethoxy)-ethoxy]-acetyl)2-Gamma-Glutamic acid-CO-(CH2)16-CO2H
  SITE 20: note = 2-aminoisobutyric acid
  SITE 25: note = Alpha-methyl-L-tyrosine
  SITE 53: note = Lysine amide is chemically modified through conjugation of the side chain with (6S,16S)-6,16-bis(aminomethyl)-4,7,15,18-tetraoxo-11-(4-oxo butanoyl)-5,8,11,14,17-pentaazahenicosanedioic acid (BEA-MalDap2) which is attached to two Fc sequences

SEQ ID NO: 519 - protein, 63 aa, synthetic construct; identical to SEQ ID NO: 496
  SITE 2: note = 2-aminoisobutyric acid
  SITE 6: note = (S)-2-amino-3-(2-fluorophenyl)-2-methylpropanoic acid
  SITE 10: note = 3-(4-pyridyl)-L-alanine
  SITE 13: note = Alpha-methyl-L-leucine
  SITE 17: note = Lysine is chemically modified through conjugation of the side chain with (2-[2-(2-amino-ethoxy)-ethoxy]-acetyl)2-Gamma-Glutamic acid-CO-(CH2)16-CO2H
  SITE 20: note = 2-aminoisobutyric acid
  SITE 25: note = Alpha-methyl-L-tyrosine
  SITE 63: note = Lysine amide is chemically modified through conjugation of the side chain with (6S,16S)-6,16-bis(aminomethyl)-4,7,15,18-tetraoxo-11-(4-oxo butanoyl)-5,8,11,14,17-pentaazahenicosanedioic acid (BEA-MalDap2) which is attached to two Fc sequences

SEQ ID NO: 520 - protein, 50 aa, synthetic construct
  SITE 2: note = 2-aminoisobutyric acid
  SITE 6: note = (S)-2-amino-3-(2-fluorophenyl)-2-methylpropanoic acid
  SITE 10: note = 3-(4-pyridyl)-L-alanine
  SITE 11: note = 2-aminoisobutyric acid
  SITE 13: note = Alpha-methyl-L-leucine
  SITE 17: note = Lysine is chemically modified through conjugation of the side chain with (2-[2-(2-amino-ethoxy)-ethoxy]-acetyl)2-Gamma-Glutamic acid-CO-(CH2)16-CO2H
  SITE 20: note = 2-aminoisobutyric acid
  SITE 25: note = Alpha-methyl-L-tyrosine
  SITE 50: note = Lysine amide is chemically modified through conjugation of the side chain with (6S,16S)-6,16-bis(aminomethyl)-4,7,15,18-tetraoxo-11-(4-oxo butanoyl)-5,8,11,14,17-pentaazahenicosanedioic acid (BEA-MalDap2) which is attached to two Fc sequences
YXEGTXTSDXXIXLDEKAQXEFIEXLIEGGGGGGGSGAPAPAPAPAPAPK

SEQ ID NO: 521 - protein, 60 aa, synthetic construct
  SITE 2: note = 2-aminoisobutyric acid
  SITE 6: note = (S)-2-amino-3-(2-fluorophenyl)-2-methylpropanoic acid
  SITE 10: note = 3-(4-pyridyl)-L-alanine
  SITE 11: note = 2-aminoisobutyric acid
  SITE 13: note = Alpha-methyl-L-leucine
  SITE 17: note = Lysine is chemically modified through conjugation of the side chain with (2-[2-(2-amino-ethoxy)-ethoxy]-acetyl)2-Gamma-Glutamic acid-CO-(CH2)16-CO2H
  SITE 20: note = 2-aminoisobutyric acid
  SITE 25: note = Alpha-methyl-L-tyrosine
  SITE 60: note = Lysine amide is chemically modified through conjugation of the side chain with (6S,16S)-6,16-bis(aminomethyl)-4,7,15,18-tetraoxo-11-(4-oxo butanoyl)-5,8,11,14,17-pentaazahenicosanedioic acid (BEA-MalDap2) which is attached to two Fc sequences
YXEGTXTSDXXIXLDEKAQXEFIEXLIEGGGGGGGSGGGGSGGGGSGAPAPAPAPAPAPK

SEQ ID NO: 522 - protein, 53 aa, synthetic construct
  SITE 2: note = 2-aminoisobutyric acid
  SITE 6: note = (S)-2-amino-3-(2-fluorophenyl)-2-methylpropanoic acid
  SITE 10: note = 3-(4-pyridyl)-L-alanine
  SITE 11: note = 2-aminoisobutyric acid
  SITE 13: note = Alpha-methyl-L-leucine
  SITE 17: note = Lysine is chemically modified through conjugation of the side chain with (2-[2-(2-amino-ethoxy)-ethoxy]-acetyl)2-Gamma-Glutamic acid-CO-(CH2)16-CO2H
  SITE 20: note = 2-aminoisobutyric acid
  SITE 25: note = Alpha-methyl-L-tyrosine
  SITE 53: note = Lysine amide is chemically modified through conjugation of the side chain with (6S,16S)-6,16-bis(aminomethyl)-4,7,15,18-tetraoxo-11-(4-oxo butanoyl)-5,8,11,14,17-pentaazahenicosanedioic acid (BEA-MalDap2) which is attached to two Fc sequences
YXEGTXTSDXXIXLDEKAQXEFIEXLIEGGGGGGGSGEAAAKEAAAKEAAAKK

SEQ ID NO: 523 - protein, 63 aa, synthetic construct
  SITE 2: note = 2-aminoisobutyric acid
  SITE 6: note = (S)-2-amino-3-(2-fluorophenyl)-2-methylpropanoic acid
  SITE 10: note = 3-(4-pyridyl)-L-alanine
  SITE 11: note = 2-aminoisobutyric acid
  SITE 13: note = Alpha-methyl-L-leucine
  SITE 17: note = Lysine is chemically modified through conjugation of the side chain with (2-[2-(2-amino-ethoxy)-ethoxy]-acetyl)2-Gamma-Glutamic acid-CO-(CH2)16-CO2H
  SITE 20: note = 2-aminoisobutyric acid
  SITE 25: note = Alpha-methyl-L-tyrosine
  SITE 63: note = Lysine amide is chemically modified through conjugation of the side chain with (6S,16S)-6,16-bis(aminomethyl)-4,7,15,18-tetraoxo-11-(4-oxo butanoyl)-5,8,11,14,17-pentaazahenicosanedioic acid (BEA-MalDap2) which is attached to two Fc sequences
YXEGTXTSDXXIXLDEKAQXEFIEXLIEGGGGGGGSGGGGSGGGGSGEAAAKEAAAKEAAAKK

SEQ ID NO: 524 - protein, 50 aa, synthetic construct
  SITE 2: note = 2-aminoisobutyric acid
  SITE 6: note = (S)-2-amino-3-(2-fluorophenyl)-2-methylpropanoic acid
  SITE 10: note = 3-(4-pyridyl)-L-alanine
  SITE 13: note = Alpha-methyl-L-leucine
  SITE 17: note = Lysine is chemically modified through conjugation of the side chain with (2-[2-(2-amino-ethoxy)-ethoxy]-acetyl)2-Gamma-Glutamic acid-CO-(CH2)16-CO2H
  SITE 20: note = 2-aminoisobutyric acid
  SITE 25: note = Alpha-methyl-L-tyrosine
  SITE 50: note = Lysine amide is chemically modified through conjugation of the side chain with (6S,16S)-6,16-bis(aminomethyl)-4,7,15,18-tetraoxo-11-(4-oxo butanoyl)-5,8,11,14,17-pentaazahenicosanedioic acid (BEA-MalDap2) which is attached to two Fc sequences
YXEGTXTSDXSIXLEEKAQXEFIEXLIEGGGGGGGSGAPAPAPAPAPAPK

SEQ ID NO: 525 - protein, 60 aa, synthetic construct
  SITE 2: note = 2-aminoisobutyric acid
  SITE 6: note = (S)-2-amino-3-(2-fluorophenyl)-2-methylpropanoic acid
  SITE 10: note = 3-(4-pyridyl)-L-alanine
  SITE 13: note = Alpha-methyl-L-leucine
  SITE 17: note = Lysine is chemically modified through conjugation of the side chain with (2-[2-(2-amino-ethoxy)-ethoxy]-acetyl)2-Gamma-Glutamic acid-CO-(CH2)16-CO2H
  SITE 20: note = 2-aminoisobutyric acid
  SITE 25: note = Alpha-methyl-L-tyrosine
  SITE 60: note = Lysine amide is chemically modified through conjugation of the side chain with (6S,16S)-6,16-bis(aminomethyl)-4,7,15,18-tetraoxo-11-(4-oxo butanoyl)-5,8,11,14,17-pentaazahenicosanedioic acid (BEA-MalDap2) which is attached to two Fc sequences
YXEGTXTSDXSIXLEEKAQXEFIEXLIEGGGGGGGSGGGGSGGGGSGAPAPAPAPAPAPK

SEQ ID NO: 526 - protein, 53 aa, synthetic construct
  SITE 2: note = 2-aminoisobutyric acid
  SITE 6: note = (S)-2-amino-3-(2-fluorophenyl)-2-methylpropanoic acid
  SITE 10: note = 3-(4-pyridyl)-L-alanine
  SITE 13: note = Alpha-methyl-L-leucine
  SITE 17: note = Lysine is chemically modified through conjugation of the side chain with (2-[2-(2-amino-ethoxy)-ethoxy]-acetyl)2-Gamma-Glutamic acid-CO-(CH2)16-CO2H
  SITE 20: note = 2-aminoisobutyric acid
  SITE 25: note = Alpha-methyl-L-tyrosine
  SITE 53: note = Lysine amide is chemically modified through conjugation of the side chain with (6S,16S)-6,16-bis(aminomethyl)-4,7,15,18-tetraoxo-11-(4-oxo butanoyl)-5,8,11,14,17-pentaazahenicosanedioic acid (BEA-MalDap2) which is attached to two Fc sequences
YXEGTXTSDXSIXLEEKAQXEFIEXLIEGGGGGGGSGEAAAKEAAAKEAAAKK

SEQ ID NO: 527 - protein, 63 aa, synthetic construct
  SITE 2: note = 2-aminoisobutyric acid
  SITE 6: note = (S)-2-amino-3-(2-fluorophenyl)-2-methylpropanoic acid
  SITE 10: note = 3-(4-pyridyl)-L-alanine
  SITE 13: note = Alpha-methyl-L-leucine
  SITE 17: note = Lysine is chemically modified through conjugation of the side chain with (2-[2-(2-amino-ethoxy)-ethoxy]-acetyl)2-Gamma-Glutamic acid-CO-(CH2)16-CO2H
  SITE 20: note = 2-aminoisobutyric acid
  SITE 25: note = Alpha-methyl-L-tyrosine
  SITE 63: note = Lysine amide is chemically modified through conjugation of the side chain with (6S,16S)-6,16-bis(aminomethyl)-4,7,15,18-tetraoxo-11-(4-oxo butanoyl)-5,8,11,14,17-pentaazahenicosanedioic acid (BEA-MalDap2) which is attached to two Fc sequences
YXEGTXTSDXSIXLEEKAQXEFIEXLIEGGGGGGGSGGGGSGGGGSGEAAAKEAAAKEAAAKK

SEQ ID NO: 528 - protein, 50 aa, synthetic construct
  SITE 2: note = 2-aminoisobutyric acid
  SITE 6: note = (S)-2-amino-3-(2-fluorophenyl)-2-methylpropanoic acid
  SITE 10: note = 3-(4-pyridyl)-L-alanine
  SITE 13: note = Alpha-methyl-L-leucine
  SITE 16: note = Ornithine
  SITE 17: note = Lysine is chemically modified through conjugation of the side chain with (2-[2-(2-amino-ethoxy)-ethoxy]-acetyl)2-Gamma-Glutamic acid-CO-(CH2)16-CO2H
  SITE 20: note = 2-aminoisobutyric acid
  SITE 25: note = Alpha-methyl-L-tyrosine
  SITE 50: note = Lysine amide is chemically modified through conjugation of the side chain with (6S,16S)-6,16-bis(aminomethyl)-4,7,15,18-tetraoxo-11-(4-oxo butanoyl)-5,8,11,14,17-pentaazahenicosanedioic acid (BEA-MalDap2) which is attached to two Fc sequences
YXEGTXTSDXSIXLEXKAQXEFIEXLIEGGGGGGGSGAPAPAPAPAPAPK

SEQ ID NO: 529 - protein, 60 aa, synthetic construct
  SITE 2: note = 2-aminoisobutyric acid
  SITE 6: note = (S)-2-amino-3-(2-fluorophenyl)-2-methylpropanoic acid
  SITE 10: note = 3-(4-pyridyl)-L-alanine
  SITE 13: note = Alpha-methyl-L-leucine
  SITE 16: note = Ornithine
  SITE 17: note = Lysine is chemically modified through conjugation of the side chain with (2-[2-(2-amino-ethoxy)-ethoxy]-acetyl)2-Gamma-Glutamic acid-CO-(CH2)16-CO2H
  SITE 20: note = 2-aminoisobutyric acid
  SITE 25: note = Alpha-methyl-L-tyrosine
  SITE 60: note = Lysine amide is chemically modified through conjugation of the side chain with (6S,16S)-6,16-bis(aminomethyl)-4,7,15,18-tetraoxo-11-(4-oxo butanoyl)-5,8,11,14,17-pentaazahenicosanedioic acid (BEA-MalDap2) which is attached to two Fc sequences
YXEGTXTSDXSIXLEXKAQXEFIEXLIEGGGGGGGSGGGGSGGGGSGAPAPAPAPAPAPK

SEQ ID NO: 530 - protein, 53 aa, synthetic construct
  SITE 2: note = 2-aminoisobutyric acid
  SITE 6: note = (S)-2-amino-3-(2-fluorophenyl)-2-methylpropanoic acid
  SITE 10: note = 3-(4-pyridyl)-L-alanine
  SITE 13: note = Alpha-methyl-L-leucine
  SITE 16: note = Ornithine
  SITE 17: note = Lysine is chemically modified through conjugation of the side chain with (2-[2-(2-amino-ethoxy)-ethoxy]-acetyl)2-Gamma-Glutamic acid-CO-(CH2)16-CO2H
  SITE 20: note = 2-aminoisobutyric acid
  SITE 25: note = Alpha-methyl-L-tyrosine
  SITE 53: note = Lysine amide is chemically modified through conjugation of the side chain with (6S,16S)-6,16-bis(aminomethyl)-4,7,15,18-tetraoxo-11-(4-oxo butanoyl)-5,8,11,14,17-pentaazahenicosanedioic acid (BEA-MalDap2) which is attached to two Fc sequences
YXEGTXTSDXSIXLEXKAQXEFIEXLIEGGGGGGGSGEAAAKEAAAKEAAAKK

SEQ ID NO: 531 - protein, 54 aa, synthetic construct
  SITE 2: note = 2-aminoisobutyric acid
  SITE 6: note = (S)-2-amino-3-(2-fluorophenyl)-2-methylpropanoic acid
  SITE 10: note = 3-(4-pyridyl)-L-alanine
  SITE 13: note = Alpha-methyl-L-leucine
  SITE 17: note = Lysine is chemically modified through conjugation of the side chain with (2-[2-(2-amino-ethoxy)-ethoxy]-acetyl)2-Gamma-Glutamic acid-CO-(CH2)16-CO2H
  SITE 20: note = 2-aminoisobutyric acid
  SITE 24: note = D-Glutamic acid
  SITE 25: note = Alpha-methyl-L-tyrosine
  SITE 54: note = Lysine amide is chemically modified through conjugation of the side chain with (6S,16S)-6,16-bis(aminomethyl)-4,7,15,18-tetraoxo-11-(4-oxo butanoyl)-5,8,11,14,17-pentaazahenicosanedioic acid (BEA-MalDap2) which is attached to two Fc sequences
YXEGTXTSDXSIXLDEKAQXEFIEXLIEGGGAPAPAPAPAPAPGGGGSGGGGSK

SEQ ID NO: 532 - protein, 41 aa, synthetic construct; identical to SEQ ID NO: 11
  SITE 2: note = 2-aminoisobutyric acid
  SITE 6: note = (S)-2-amino-3-(2-fluorophenyl)-2-methylpropanoic acid
  SITE 10: note = 3-(4-pyridyl)-L-alanine
  SITE 13: note = Alpha-methyl-L-leucine
  SITE 17: note = Lysine is chemically modified through conjugation of the side chain with (2-[2-(2-amino-ethoxy)-ethoxy]-acetyl)2-Gamma-Glutamic acid-CO-(CH2)16-CO2H
  SITE 20: note = 2-aminoisobutyric acid
  SITE 24: note = Lysine is chemically modified through conjugation of the side chain with SGGGGSGGGGSGGGGGPAPAPAPAPAPAG-(6S,16S)-6,16-bis(aminomethyl )-4,7,15,18-tetraoxo-11-(4-oxobutanoyl)-5,8,11,14,17-pentaa zahenicosanedioic acid (BEA-MalDap2) which is attached to two Fc sequences
  SITE 25: note = Alpha-methyl-L-tyrosine
  SITE 41: note = Amidated Serine

SEQ ID NO: 533 - protein, 41 aa, synthetic construct; identical to SEQ ID NO: 11
  SITE 2: note = 2-aminoisobutyric acid
  SITE 6: note = (S)-2-amino-3-(2-fluorophenyl)-2-methylpropanoic acid
  SITE 10: note = 3-(4-pyridyl)-L-alanine
  SITE 13: note = Alpha-methyl-L-leucine
  SITE 17: note = Lysine is chemically modified through conjugation of the side chain with (2-[2-(2-amino-ethoxy)-ethoxy]-acetyl)2-Gamma-Glutamic acid-CO-(CH2)16-CO2H
  SITE 20: note = 2-aminoisobutyric acid
  SITE 24: note = Lysine is chemically modified through conjugation of the side chain with SGGGGSGGGGSGGGGGKAAAEKAAAEKAAAEG-(6S,16S)-6,16-bis(aminomet hyl)-4,7,15,18-tetraoxo-11-(4-oxobutanoyl)-5,8,11,14,17-pen taazahenicosanedioic acid (BEA-MalDap2) which is attached to two Fc sequences
  SITE 25: note = Alpha-methyl-L-tyrosine
  SITE 41: note = Amidated Serine

SEQ ID NO: 534 - protein, 41 aa, synthetic construct; identical to SEQ ID NO: 12
  SITE 2: note = 2-aminoisobutyric acid
  SITE 6: note = (S)-2-amino-3-(2-fluorophenyl)-2-methylpropanoic acid
  SITE 10: note = 3-(4-pyridyl)-L-alanine
  SITE 13: note = Alpha-methyl-L-leucine
  SITE 17: note = Lysine is chemically modified through conjugation of the side chain with (2-[2-(2-amino-ethoxy)-ethoxy]-acetyl)2-Gamma-Glutamic acid-CO-(CH2)16-CO2H
  SITE 20: note = 2-aminoisobutyric acid
  SITE 25: note = Alpha-methyl-L-tyrosine
  SITE 28: note = Lysine is chemically modified through conjugation of the side chain with SGGGGSGGGGSGGGGGPAPAPAPAPAPAG-(6S,16S)-6,16-bis(aminomethyl )-4,7,15,18-tetraoxo-11-(4-oxobutanoyl)-5,8,11,14,17-pentaa zahenicosanedioic acid (BEA-MalDap2) which is attached to two Fc sequences
  SITE 41: note = Amidated Serine

SEQ ID NO: 535 - protein, 41 aa, synthetic construct; identical to SEQ ID NO: 12
  SITE 2: note = 2-aminoisobutyric acid
  SITE 6: note = (S)-2-amino-3-(2-fluorophenyl)-2-methylpropanoic acid
  SITE 10: note = 3-(4-pyridyl)-L-alanine
  SITE 13: note = Alpha-methyl-L-leucine
  SITE 17: note = Lysine is chemically modified through conjugation of the side chain with (2-[2-(2-amino-ethoxy)-ethoxy]-acetyl)2-Gamma-Glutamic acid-CO-(CH2)16-CO2H
  SITE 20: note = 2-aminoisobutyric acid
  SITE 25: note = Alpha-methyl-L-tyrosine
  SITE 28: note = Lysine is chemically modified through conjugation of the side chain with SGGGGSGGGGSGGGGGKAAAEKAAAEKAAAEG-(6S,16S)-6,16-bis(aminomet hyl)-4,7,15,18-tetraoxo-11-(4-oxobutanoyl)-5,8,11,14,17-pen taazahenicosanedioic acid (BEA-MalDap2) which is attached to two Fc sequences
  SITE 41: note = Amidated Serine

SEQ ID NO: 536 - protein, 40 aa, synthetic construct; identical to SEQ ID NO: 459
  SITE 2: note = 2-aminoisobutyric acid
  SITE 6: note = (S)-2-amino-3-(2-fluorophenyl)-2-methylpropanoic acid
  SITE 10: note = 3-(4-pyridyl)-L-alanine
  SITE 13: note = Alpha-methyl-L-leucine
  SITE 17: note = Lysine is chemically modified through conjugation of the side chain with (2-[2-(2-amino-ethoxy)-ethoxy]-acetyl)2-Gamma-Glutamic acid-CO-(CH2)16-CO2H
  SITE 20: note = 2-aminoisobutyric acid
  SITE 24: note = D-Glutamic acid
  SITE 25: note = Alpha-methyl-L-tyrosine
  SITE 40: note = Lysine amide is chemically modified through conjugation of the side chain with (2-[2-(2-amino-ethoxy)-ethoxy]-acetyl)4-GPKPKPKPKPKPK-(6S,1 6S)-6,16-bis(aminomethyl)-4,7,15,18-tetraoxo-11-(4-oxobutan oyl)-5,8,11,14,17-pentaazahenicosanedioic acid (BEA-MalDap2) which is attached to two Fc sequences

SEQ ID NO: 537 - protein, 40 aa, synthetic construct; identical to SEQ ID NO: 459
  SITE 2: note = 2-aminoisobutyric acid
  SITE 6: note = (S)-2-amino-3-(2-fluorophenyl)-2-methylpropanoic acid
  SITE 10: note = 3-(4-pyridyl)-L-alanine
  SITE 13: note = Alpha-methyl-L-leucine
  SITE 17: note = Lysine is chemically modified through conjugation of the side chain with (2-[2-(2-amino-ethoxy)-ethoxy]-acetyl)2-Gamma-Glutamic acid-CO-(CH2)16-CO2H
  SITE 20: note = 2-aminoisobutyric acid
  SITE 24: note = D-Glutamic acid
  SITE 25: note = Alpha-methyl-L-tyrosine
  SITE 40: note = Lysine amide is chemically modified through conjugation of the side chain with (2-[2-(2-amino-ethoxy)-ethoxy]-acetyl)4-GPEPEPEPEPEPE-(6S,1 6S)-6,16-bis(aminomethyl)-4,7,15,18-tetraoxo-11-(4-oxobutan oyl)-5,8,11,14,17-pentaazahenicosanedioic acid (BEA-MalDap2) which is attached to two Fc sequences

SEQ ID NO: 538 - protein, 50 aa, synthetic construct
  SITE 2: note = 2-aminoisobutyric acid
  SITE 6: note = (S)-2-amino-3-(2-fluorophenyl)-2-methylpropanoic acid
  SITE 10: note = 3-(4-pyridyl)-L-alanine
  SITE 13: note = Alpha-methyl-L-leucine
  SITE 17: note = Lysine is chemically modified through conjugation of the side chain with (2-[2-(2-amino-ethoxy)-ethoxy]-acetyl)2-Gamma-Glutamic acid-CO-(CH2)16-CO2H
  SITE 20: note = 2-aminoisobutyric acid
  SITE 25: note = Alpha-methyl-L-tyrosine
  SITE 50: note = Lysine amide is chemically modified through conjugation of the side chain with (6S,16S)-6,16-bis(aminomethyl)-4,7,15,18-tetraoxo-11-(4-oxo butanoyl)-5,8,11,14,17-pentaazahenicosanedioic acid (BEA-MalDap2) which is attached to two Fc sequences
YXEGTXTSDXSIXLEEKAQXEFIEXLIEGGGGGGGSGEPEPEPEPEPEPK

SEQ ID NO: 539 - protein, 60 aa, synthetic construct
  SITE 2: note = 2-aminoisobutyric acid
  SITE 6: note = (S)-2-amino-3-(2-fluorophenyl)-2-methylpropanoic acid
  SITE 10: note = 3-(4-pyridyl)-L-alanine
  SITE 13: note = Alpha-methyl-L-leucine
  SITE 17: note = Lysine is chemically modified through conjugation of the side chain with (2-[2-(2-amino-ethoxy)-ethoxy]-acetyl)2-Gamma-Glutamic acid-CO-(CH2)16-CO2H
  SITE 20: note = 2-aminoisobutyric acid
  SITE 25: note = Alpha-methyl-L-tyrosine
  SITE 60: note = Lysine amide is chemically modified through conjugation of the side chain with (6S,16S)-6,16-bis(aminomethyl)-4,7,15,18-tetraoxo-11-(4-oxo butanoyl)-5,8,11,14,17-pentaazahenicosanedioic acid (BEA-MalDap2) which is attached to two Fc sequences
YXEGTXTSDXSIXLEEKAQXEFIEXLIEGGGGGGGSGGGGSGGGGSGEPEPEPEPEPEPK

SEQ ID NO: 540 - protein, 60 aa, synthetic construct
  SITE 2: note = 2-aminoisobutyric acid
  SITE 6: note = (S)-2-amino-3-(2-fluorophenyl)-2-methylpropanoic acid
  SITE 10: note = 3-(4-pyridyl)-L-alanine
  SITE 13: note = Alpha-methyl-L-leucine
  SITE 17: note = Lysine is chemically modified through conjugation of the side chain with (2-[2-(2-amino-ethoxy)-ethoxy]-acetyl)2-Gamma-Glutamic acid-CO-(CH2)16-CO2H
  SITE 20: note = 2-aminoisobutyric acid
  SITE 25: note = Alpha-methyl-L-tyrosine
  SITE 60: note = Lysine amide is chemically modified through conjugation of the side chain with (6S,16S)-6,16-bis(aminomethyl)-4,7,15,18-tetraoxo-11-(4-oxo butanoyl)-5,8,11,14,17-pentaazahenicosanedioic acid (BEA-MalDap2) which is attached to two Fc sequences
YXEGTXTSDXSIXLEEKAQXEFIEXLIEGGGGGGGQGGGGQGGGGQGEPEPEPEPEPEPK

SEQ ID NO: 541 - protein, 50 aa, synthetic construct
  SITE 2: note = 2-aminoisobutyric acid
  SITE 6: note = (S)-2-amino-3-(2-fluorophenyl)-2-methylpropanoic acid
  SITE 10: note = 3-(4-pyridyl)-L-alanine
  SITE 13: note = Alpha-methyl-L-leucine
  SITE 16: note = Ornithine
  SITE 17: note = Lysine is chemically modified through conjugation of the side chain with (2-[2-(2-amino-ethoxy)-ethoxy]-acetyl)2-Gamma-Glutamic acid-CO-(CH2)16-CO2H
  SITE 20: note = 2-aminoisobutyric acid
  SITE 25: note = Alpha-methyl-L-tyrosine
  SITE 50: note = Lysine amide is chemically modified through conjugation of the side chain with (6S,16S)-6,16-bis(aminomethyl)-4,7,15,18-tetraoxo-11-(4-oxo butanoyl)-5,8,11,14,17-pentaazahenicosanedioic acid (BEA-MalDap2) which is attached to two Fc sequences
YXEGTXTSDXSIXLEXKAQXEFIEXLIEGGGGGGGSGEPEPEPEPEPEPK

SEQ ID NO: 542 - protein, 60 aa, synthetic construct
  SITE 2: note = 2-aminoisobutyric acid
  SITE 6: note = (S)-2-amino-3-(2-fluorophenyl)-2-methylpropanoic acid
  SITE 10: note = 3-(4-pyridyl)-L-alanine
  SITE 13: note = Alpha-methyl-L-leucine
  SITE 16: note = Ornithine
  SITE 17: note = Lysine is chemically modified through conjugation of the side chain with (2-[2-(2-amino-ethoxy)-ethoxy]-acetyl)2-Gamma-Glutamic acid-CO-(CH2)16-CO2H
  SITE 20: note = 2-aminoisobutyric acid
  SITE 25: note = Alpha-methyl-L-tyrosine
  SITE 60: note = Lysine amide is chemically modified through conjugation of the side chain with (6S,16S)-6,16-bis(aminomethyl)-4,7,15,18-tetraoxo-11-(4-oxo butanoyl)-5,8,11,14,17-pentaazahenicosanedioic acid (BEA-MalDap2) which is attached to two Fc sequences
YXEGTXTSDXSIXLEXKAQXEFIEXLIEGGGGGGGSGGGGSGGGGSGEPEPEPEPEPEPK

SEQ ID NO: 543 - protein, 60 aa, synthetic construct
  SITE 2: note = 2-aminoisobutyric acid
  SITE 6: note = (S)-2-amino-3-(2-fluorophenyl)-2-methylpropanoic acid
  SITE 10: note = 3-(4-pyridyl)-L-alanine
  SITE 13: note = Alpha-methyl-L-leucine
  SITE 16: note = Ornithine
  SITE 17: note = Lysine is chemically modified through conjugation of the side chain with (2-[2-(2-amino-ethoxy)-ethoxy]-acetyl)2-Gamma-Glutamic acid-CO-(CH2)16-CO2H
  SITE 20: note = 2-aminoisobutyric acid
  SITE 25: note = Alpha-methyl-L-tyrosine
  SITE 60: note = Lysine amide is chemically modified through conjugation of the side chain with (6S,16S)-6,16-bis(aminomethyl)-4,7,15,18-tetraoxo-11-(4-oxo butanoyl)-5,8,11,14,17-pentaazahenicosanedioic acid (BEA-MalDap2) which is attached to two Fc sequences
YXEGTXTSDXSIXLEXKAQXEFIEXLIEGGGGGGGQGGGGQGGGGQGEPEPEPEPEPEPK

SEQ ID NO: 544 - protein, 55 aa, synthetic construct
  SITE 2: note = 2-aminoisobutyric acid
  SITE 6: note = (S)-2-amino-3-(2-fluorophenyl)-2-methylpropanoic acid
  SITE 10: note = 3-(4-pyridyl)-L-alanine
  SITE 13: note = Alpha-methyl-L-leucine
  SITE 17: note = Lysine is chemically modified through conjugation of the side chain with (2-[2-(2-amino-ethoxy)-ethoxy]-acetyl)2-Gamma-Glutamic acid-CO-(CH2)16-CO2H
  SITE 20: note = 2-aminoisobutyric acid
  SITE 25: note = Alpha-methyl-L-tyrosine
  SITE 40: note = 2-[2-(2-amino-ethoxy)-ethoxy]-acetyl
  SITE 41: note = 2-[2-(2-amino-ethoxy)-ethoxy]-acetyl
  SITE 55: note = Lysine amide is chemically modified through conjugation of the side chain with (6S,16S)-6,16-bis(aminomethyl)-4,7,15,18-tetraoxo-11-(4-oxo butanoyl)-5,8,11,14,17-pentaazahenicosanedioic acid (BEA-MalDap2) which is attached to two Fc sequences
YXEGTXTSDXSIXLEEKAQXEFIEXLIEGSPSSGAPPPSXXGEPEPEPEPEPEPK

SEQ ID NO: 545 - protein, 57 aa, synthetic construct
  SITE 2: note = 2-aminoisobutyric acid
  SITE 6: note = (S)-2-amino-3-(2-fluorophenyl)-2-methylpropanoic acid
  SITE 10: note = 3-(4-pyridyl)-L-alanine
  SITE 13: note = Alpha-methyl-L-leucine
  SITE 17: note = Lysine is chemically modified through conjugation of the side chain with (2-[2-(2-amino-ethoxy)-ethoxy]-acetyl)2-Gamma-Glutamic acid-CO-(CH2)16-CO2H
  SITE 20: note = 2-aminoisobutyric acid
  SITE 25: note = Alpha-methyl-L-tyrosine
  SITE 40: note = 2-[2-(2-amino-ethoxy)-ethoxy]-acetyl
  SITE 41: note = 2-[2-(2-amino-ethoxy)-ethoxy]-acetyl
  SITE 42: note = 2-[2-(2-amino-ethoxy)-ethoxy]-acetyl
  SITE 43: note = 2-[2-(2-amino-ethoxy)-ethoxy]-acetyl
  SITE 57: note = Lysine amide is chemically modified through conjugation of the side chain with (6S,16S)-6,16-bis(aminomethyl)-4,7,15,18-tetraoxo-11-(4-oxo butanoyl)-5,8,11,14,17-pentaazahenicosanedioic acid (BEA-MalDap2) which is attached to two Fc sequences
YXEGTXTSDXSIXLEEKAQXEFIEXLIEGSPSSGAPPPSXXXXGEPEPEPEPEPEPK

SEQ ID NO: 546 - protein, 55 aa, synthetic construct
  SITE 2: note = 2-aminoisobutyric acid
  SITE 6: note = (S)-2-amino-3-(2-fluorophenyl)-2-methylpropanoic acid
  SITE 10: note = 3-(4-pyridyl)-L-alanine
  SITE 13: note = Alpha-methyl-L-leucine
  SITE 16: note = Ornithine
  SITE 17: note = Lysine is chemically modified through conjugation of the side chain with (2-[2-(2-amino-ethoxy)-ethoxy]-acetyl)2-Gamma-Glutamic acid-CO-(CH2)16-CO2H
  SITE 20: note = 2-aminoisobutyric acid
  SITE 25: note = Alpha-methyl-L-tyrosine
  SITE 40: note = 2-[2-(2-amino-ethoxy)-ethoxy]-acetyl
  SITE 41: note = 2-[2-(2-amino-ethoxy)-ethoxy]-acetyl
  SITE 55: note = Lysine amide is chemically modified through conjugation of the side chain with (6S,16S)-6,16-bis(aminomethyl)-4,7,15,18-tetraoxo-11-(4-oxo butanoyl)-5,8,11,14,17-pentaazahenicosanedioic acid (BEA-MalDap2) which is attached to two Fc sequences
YXEGTXTSDXSIXLEXKAQXEFIEXLIEGSPSSGAPPPSXXGEPEPEPEPEPEPK

SEQ ID NO: 547 - protein, 57 aa, synthetic construct
  SITE 2: note = 2-aminoisobutyric acid
  SITE 6: note = (S)-2-amino-3-(2-fluorophenyl)-2-methylpropanoic acid
  SITE 10: note = 3-(4-pyridyl)-L-alanine
  SITE 13: note = Alpha-methyl-L-leucine
  SITE 16: note = Ornithine
  SITE 17: note = Lysine is chemically modified through conjugation of the side chain with (2-[2-(2-amino-ethoxy)-ethoxy]-acetyl)2-Gamma-Glutamic acid-CO-(CH2)16-CO2H
  SITE 20: note = 2-aminoisobutyric acid
  SITE 25: note = Alpha-methyl-L-tyrosine
  SITE 40: note = 2-[2-(2-amino-ethoxy)-ethoxy]-acetyl
  SITE 41: note = 2-[2-(2-amino-ethoxy)-ethoxy]-acetyl
  SITE 42: note = 2-[2-(2-amino-ethoxy)-ethoxy]-acetyl
  SITE 43: note = 2-[2-(2-amino-ethoxy)-ethoxy]-acetyl
  SITE 57: note = Lysine amide is chemically modified through conjugation of the side chain with (6S,16S)-6,16-bis(aminomethyl)-4,7,15,18-tetraoxo-11-(4-oxo butanoyl)-5,8,11,14,17-pentaazahenicosanedioic acid (BEA-MalDap2) which is attached to two Fc sequences
YXEGTXTSDXSIXLEXKAQXEFIEXLIEGSPSSGAPPPSXXXXGEPEPEPEPEPEPK

SEQ ID NO: 548 - protein, 40 aa, synthetic construct; identical to SEQ ID NO: 476
  SITE 2: note = 2-aminoisobutyric acid
  SITE 6: note = (S)-2-amino-3-(2-fluorophenyl)-2-methylpropanoic acid
  SITE 10: note = 3-(4-pyridyl)-L-alanine
  SITE 13: note = Alpha-methyl-L-leucine
  SITE 17: note = Lysine is chemically modified through conjugation of the side chain with (2-[2-(2-amino-ethoxy)-ethoxy]-acetyl)2-Gamma-Glutamic acid-CO-(CH2)16-CO2H
  SITE 20: note = 2-aminoisobutyric acid
  SITE 25: note = Alpha-methyl-L-tyrosine
  SITE 40: note = Lysine amide is chemically modified through conjugation of the side chain with (2-[2-(2-amino-ethoxy)-ethoxy]-acetyl)6-GPAPAPAPAPAPA-(6S,1 6S)-6,16-bis(aminomethyl)-4,7,15,18-tetraoxo-11-(4-oxobutan oyl)-5,8,11,14,17-pentaazahenicosanedioic acid (BEA-MalDap2) which is attached to two Fc sequences

SEQ ID NO: 549 - protein, 40 aa, synthetic construct; identical to SEQ ID NO: 476
  SITE 2: note = 2-aminoisobutyric acid
  SITE 6: note = (S)-2-amino-3-(2-fluorophenyl)-2-methylpropanoic acid
  SITE 10: note = 3-(4-pyridyl)-L-alanine
  SITE 13: note = Alpha-methyl-L-leucine
  SITE 17: note = Lysine is chemically modified through conjugation of the side chain with (2-[2-(2-amino-ethoxy)-ethoxy]-acetyl)2-Gamma-Glutamic acid-CO-(CH2)16-CO2H
  SITE 20: note = 2-aminoisobutyric acid
  SITE 25: note = Alpha-methyl-L-tyrosine
  SITE 40: note = Lysine amide is chemically modified through conjugation of the side chain with (2-[2-(2-amino-ethoxy)-ethoxy]-acetyl)4-GPEPEPEPEPEPE-(6S,1 6S)-6,16-bis(aminomethyl)-4,7,15,18-tetraoxo-11-(4-oxobutan oyl)-5,8,11,14,17-pentaazahenicosanedioic acid (BEA-MalDap2) which is attached to two Fc sequences

SEQ ID NO: 550 - protein, 40 aa, synthetic construct; identical to SEQ ID NO: 476
  SITE 2: note = 2-aminoisobutyric acid
  SITE 6: note = (S)-2-amino-3-(2-fluorophenyl)-2-methylpropanoic acid
  SITE 10: note = 3-(4-pyridyl)-L-alanine
  SITE 13: note = Alpha-methyl-L-leucine
  SITE 17: note = Lysine is chemically modified through conjugation of the side chain with (2-[2-(2-amino-ethoxy)-ethoxy]-acetyl)2-Gamma-Glutamic acid-CO-(CH2)16-CO2H
  SITE 20: note = 2-aminoisobutyric acid
  SITE 25: note = Alpha-methyl-L-tyrosine
  SITE 40: note = Lysine amide is chemically modified through conjugation of the side chain with (2-[2-(2-amino-ethoxy)-ethoxy]-acetyl)4-GPEPEPEPEPEPEPEPE-( 6S,16S)-6,16-bis(aminomethyl)-4,7,15,18-tetraoxo-11-(4-oxob utanoyl)-5,8,11,14,17-pentaazahenicosanedioic acid (BEA-MalDap2) which is attached to two Fc sequences

SEQ ID NO: 551 - protein, 40 aa, synthetic construct
  SITE 2: note = 2-aminoisobutyric acid
  SITE 6: note = (S)-2-amino-3-(2-fluorophenyl)-2-methylpropanoic acid
  SITE 10: note = 3-(4-pyridyl)-L-alanine
  SITE 13: note = Alpha-methyl-L-leucine
  SITE 16: note = Ornithine
  SITE 17: note = Lysine is chemically modified through conjugation of the side chain with (2-[2-(2-amino-ethoxy)-ethoxy]-acetyl)2-Gamma-Glutamic acid-CO-(CH2)16-CO2H
  SITE 20: note = 2-aminoisobutyric acid
  SITE 25: note = Alpha-methyl-L-tyrosine
  SITE 40: note = Lysine amide is chemically modified through conjugation of the side chain with (2-[2-(2-amino-ethoxy)-ethoxy]-acetyl)6-GPAPAPAPAPAPA-(6S,1 6S)-6,16-bis(aminomethyl)-4,7,15,18-tetraoxo-11-(4-oxobutan oyl)-5,8,11,14,17-pentaazahenicosanedioic acid (BEA-MalDap2) which is attached to two Fc sequences
YXEGTXTSDXSIXLEXKAQXEFIEXLIEGSPSSGAPPPSK

SEQ ID NO: 552 - protein, 40 aa, synthetic construct; identical to SEQ ID NO: 551
  SITE 2: note = 2-aminoisobutyric acid
  SITE 6: note = (S)-2-amino-3-(2-fluorophenyl)-2-methylpropanoic acid
  SITE 10: note = 3-(4-pyridyl)-L-alanine
  SITE 13: note = Alpha-methyl-L-leucine
  SITE 16: note = Ornithine
  SITE 17: note = Lysine is chemically modified through conjugation of the side chain with (2-[2-(2-amino-ethoxy)-ethoxy]-acetyl)2-Gamma-Glutamic acid-CO-(CH2)16-CO2H
  SITE 20: note = 2-aminoisobutyric acid
  SITE 25: note = Alpha-methyl-L-tyrosine
  SITE 40: note = Lysine amide is chemically modified through conjugation of the side chain with (2-[2-(2-amino-ethoxy)-ethoxy]-acetyl)4-GPEPEPEPEPEPE-(6S,1 6S)-6,16-bis(aminomethyl)-4,7,15,18-tetraoxo-11-(4-oxobutan oyl)-5,8,11,14,17-pentaazahenicosanedioic acid (BEA-MalDap2) which is attached to two Fc sequences

SEQ ID NO: 553 - protein, 40 aa, synthetic construct; identical to SEQ ID NO: 551
  SITE 2: note = 2-aminoisobutyric acid
  SITE 6: note = (S)-2-amino-3-(2-fluorophenyl)-2-methylpropanoic acid
  SITE 10: note = 3-(4-pyridyl)-L-alanine
  SITE 13: note = Alpha-methyl-L-leucine
  SITE 16: note = Ornithine
  SITE 17: note = Lysine is chemically modified through conjugation of the side chain with (2-[2-(2-amino-ethoxy)-ethoxy]-acetyl)2-Gamma-Glutamic acid-CO-(CH2)16-CO2H
  SITE 20: note = 2-aminoisobutyric acid
  SITE 25: note = Alpha-methyl-L-tyrosine
  SITE 40: note = Lysine amide is chemically modified through conjugation of the side chain with (2-[2-(2-amino-ethoxy)-ethoxy]-acetyl)4-GPEPEPEPEPEPEPEPE-( 6S,16S)-6,16-bis(aminomethyl)-4,7,15,18-tetraoxo-11-(4-oxob utanoyl)-5,8,11,14,17-pentaazahenicosanedioic acid (BEA-MalDap2) which is attached to two Fc sequences

SEQ ID NO: 554 - protein, 55 aa, synthetic construct
  SITE 2: note = 2-aminoisobutyric acid
  SITE 6: note = (S)-2-amino-3-(2-fluorophenyl)-2-methylpropanoic acid
  SITE 10: note = 3-(4-pyridyl)-L-alanine
  SITE 13: note = Alpha-methyl-L-leucine
  SITE 16: note = Ornithine
  SITE 17: note = Lysine is chemically modified through conjugation of the side chain with (2-[2-(2-amino-ethoxy)-ethoxy]-acetyl)2-Gamma-Glutamic acid-C18_OH
  SITE 20: note = 2-aminoisobutyric acid
  SITE 25: note = Alpha-methyl-L-tyrosine
  SITE 55: note = Lysine amide is chemically modified through conjugation of the side chain with (6S,16S)-6,16-bis(aminomethyl)-4,7,15,18-tetraoxo-11-(4-oxo butanoyl)-5,8,11,14,17-pentaazahenicosanedioic acid (BEA-MalDap2) which is attached to two Fc sequences
YXEGTXTSDXSIXLDXKAQXEFIEXLIEGGGGGGGSGGGGSGAPAPAPAPAPAPK

SEQ ID NO: 555 - protein, 55 aa, synthetic construct
  SITE 2: note = 2-aminoisobutyric acid
  SITE 6: note = (S)-2-amino-3-(2-fluorophenyl)-2-methylpropanoic acid
  SITE 10: note = 3-(4-pyridyl)-L-alanine
  SITE 11: note = 2-aminoisobutyric acid
  SITE 13: note = Alpha-methyl-L-leucine
  SITE 16: note = Ornithine
  SITE 17: note = Lysine is chemically modified through conjugation of the side chain with (2-[2-(2-amino-ethoxy)-ethoxy]-acetyl)2-Gamma-Glutamic acid-CO-(CH2)16-CO2H
  SITE 20: note = 2-aminoisobutyric acid
  SITE 25: note = Alpha-methyl-L-tyrosine
  SITE 55: note = Lysine amide is chemically modified through conjugation of the side chain with (6S,16S)-6,16-bis(aminomethyl)-4,7,15,18-tetraoxo-11-(4-oxo butanoyl)-5,8,11,14,17-pentaazahenicosanedioic acid (BEA-MalDap2) which is attached to two Fc sequences
YXEGTXTSDXXIXLDXKAQXEFIEXLIEGGGGGGGSGGGGSGAPAPAPAPAPAPK

SEQ ID NO: 556 - protein, 55 aa, synthetic construct
  SITE 2: note = 2-aminoisobutyric acid
  SITE 6: note = (S)-2-amino-3-(2-fluorophenyl)-2-methylpropanoic acid
  SITE 10: note = 3-(4-pyridyl)-L-alanine
  SITE 13: note = Alpha-methyl-L-leucine
  SITE 16: note = Ornithine
  SITE 17: note = Lysine is chemically modified through conjugation of the side chain with (2-[2-(2-amino-ethoxy)-ethoxy]-acetyl)2-Gamma-Glutamic acid-CO-(CH2)16-CO2H
  SITE 20: note = 2-aminoisobutyric acid
  SITE 25: note = Alpha-methyl-L-tyrosine
  SITE 55: note = Lysine amide is chemically modified through conjugation of the side chain with (6S,16S)-6,16-bis(aminomethyl)-4,7,15,18-tetraoxo-11-(4-oxo butanoyl)-5,8,11,14,17-pentaazahenicosanedioic acid (BEA-MalDap2) which is attached to two Fc sequences
YXEGTXTSDXSIXLEXKAQXEFIEXLIEGGGGGGGSGGGGSGAPAPAPAPAPAPK

SEQ ID NO: 557 - protein, 55 aa, synthetic construct
  SITE 2: note = 2-aminoisobutyric acid
  SITE 6: note = (S)-2-amino-3-(2-fluorophenyl)-2-methylpropanoic acid
  SITE 10: note = 3-(4-pyridyl)-L-alanine
  SITE 11: note = 2-aminoisobutyric acid
  SITE 13: note = Alpha-methyl-L-leucine
  SITE 16: note = Ornithine
  SITE 17: note = Lysine is chemically modified through conjugation of the side chain with (2-[2-(2-amino-ethoxy)-ethoxy]-acetyl)2-Gamma-Glutamic acid-CO-(CH2)16-CO2H
  SITE 20: note = 2-aminoisobutyric acid
  SITE 25: note = Alpha-methyl-L-tyrosine
  SITE 55: note = Lysine amide is chemically modified through conjugation of the side chain with (6S,16S)-6,16-bis(aminomethyl)-4,7,15,18-tetraoxo-11-(4-oxo butanoyl)-5,8,11,14,17-pentaazahenicosanedioic acid (BEA-MalDap2) which is attached to two Fc sequences
YXEGTXTSDXXIXLEXKAQXEFIEXLIEGGGGGGGSGGGGSGAPAPAPAPAPAPK

SEQ ID NO: 558 - protein, 55 aa, synthetic construct; identical to SEQ ID NO: 555
  SITE 2: note = 2-aminoisobutyric acid
  SITE 6: note = (S)-2-amino-3-(2-fluorophenyl)-2-methylpropanoic acid
  SITE 10: note = 3-(4-pyridyl)-L-alanine
  SITE 11: note = 2-aminoisobutyric acid
  SITE 13: note = Alpha-methyl-L-leucine
  SITE 16: note = Ornithine
  SITE 17: note = Lysine is chemically modified through conjugation of the side chain with (2-[2-(2-amino-ethoxy)-ethoxy]-acetyl)2-Gamma-Glutamic acid-CO-(CH2)16-CO2H
  SITE 20: note = 2-aminoisobutyric acid
  SITE 24: note = D-Glutamic acid
  SITE 25: note = Alpha-methyl-L-tyrosine
  SITE 55: note = Lysine amide is chemically modified through conjugation of the side chain with (6S,16S)-6,16-bis(aminomethyl)-4,7,15,18-tetraoxo-11-(4-oxo butanoyl)-5,8,11,14,17-pentaazahenicosanedioic acid (BEA-MalDap2) which is attached to two Fc sequences

SEQ ID NO: 559 - protein, 41 aa, synthetic construct; identical to SEQ ID NO: 28
  SITE 2: note = 2-aminoisobutyric acid
  SITE 6: note = (S)-2-amino-3-(2-fluorophenyl)-2-methylpropanoic acid
  SITE 10: note = 3-(4-pyridyl)-L-alanine
  SITE 13: note = Alpha-methyl-L-leucine
  SITE 16: note = Ornithine
  SITE 17: note = Lysine is chemically modified through conjugation of the side chain with (2-[2-(2-amino-ethoxy)-ethoxy]-acetyl)2-Gamma-Glutamic acid-CO-(CH2)16-CO2H
  SITE 20: note = 2-aminoisobutyric acid
  SITE 24: note = Lysine is chemically modified through conjugation of the side chain with GGGGSGGGGSGAPAPAPAPAPAPG-(6S,16S)-6,16-bis(aminomethyl)-4,7 ,15,18-tetraoxo-11-(4-oxobutanoyl)-5,8,11,14,17-pentaazahen icosanedioic acid (BEA-MalDap2) which is attached to two Fc sequences
  SITE 25: note = Alpha-methyl-L-tyrosine
  SITE 41: note = Amidated Serine

SEQ ID NO: 560 - protein, 41 aa, synthetic construct; identical to SEQ ID NO: 29
  SITE 2: note = 2-aminoisobutyric acid
  SITE 6: note = (S)-2-amino-3-(2-fluorophenyl)-2-methylpropanoic acid
  SITE 10: note = 3-(4-pyridyl)-L-alanine
  SITE 11: note = 2-aminoisobutyric acid
  SITE 13: note = Alpha-methyl-L-leucine
  SITE 16: note = Ornithine
  SITE 17: note = Lysine is chemically modified through conjugation of the side chain with (2-[2-(2-amino-ethoxy)-ethoxy]-acetyl)2-Gamma-Glutamic acid-CO-(CH2)16-CO2H
  SITE 20: note = 2-aminoisobutyric acid
  SITE 24: note = Lysine is chemically modified through conjugation of the side chain with GGGGSGGGGSGAPAPAPAPAPAPG-(6S,16S)-6,16-bis(aminomethyl)-4,7 ,15,18-tetraoxo-11-(4-oxobutanoyl)-5,8,11,14,17-pentaazahen icosanedioic acid (BEA-MalDap2) which is attached to two Fc sequences
  SITE 25: note = Alpha-methyl-L-tyrosine
  SITE 41: note = Amidated Serine

SEQ ID NO: 561 - protein, 41 aa, synthetic construct
  SITE 2: note = 2-aminoisobutyric acid
  SITE 6: note = (S)-2-amino-3-(2-fluorophenyl)-2-methylpropanoic acid
  SITE 10: note = 3-(4-pyridyl)-L-alanine
  SITE 11: note = 2-aminoisobutyric acid
  SITE 13: note = Alpha-methyl-L-leucine
  SITE 16: note = Ornithine
  SITE 17: note = Lysine is chemically modified through conjugation of the side chain with epsilon-Lysine-epsilon-Lysine-Gamma-Glutamic acid-CO-(CH2)16-CO2H
  SITE 20: note = 2-aminoisobutyric acid
  SITE 25: note = Alpha-methyl-L-tyrosine
  SITE 41: note = Lysine amide is chemically modified through conjugation of the side chain with 24x Polyethylene glycol-(6S,16S)-6,16-bis(aminomethyl)-4,7,15,18-tetraoxo-11 -(4-oxobutanoyl)-5,8,11,14,17-pentaazahenicosanedioic acid (BEA-MalDap2) which is attached to two Fc sequences
YXEGTXTSDXXIXLDXKAQXEFIEXLIEGGPSSGAPPPSGK

SEQ ID NO: 562 - protein, 41 aa, synthetic construct
  SITE 2: note = 2-aminoisobutyric acid
  SITE 6: note = (S)-2-amino-3-(2-fluorophenyl)-2-methylpropanoic acid
  SITE 10: note = 3-(4-pyridyl)-L-alanine
  SITE 11: note = 2-aminoisobutyric acid
  SITE 13: note = Alpha-methyl-L-leucine
  SITE 16: note = Ornithine
  SITE 17: note = Lysine is chemically modified through conjugation of the side chain with epsilon-Lysine-epsilon-Lysine-Gamma-Glutamic acid-CO-(CH2)16-CO2H
  SITE 20: note = 2-aminoisobutyric acid
  SITE 25: note = Alpha-methyl-L-tyrosine
  SITE 41: note = Lysine amide is chemically modified through conjugation of the side chain with 24x Polyethylene glycol-(6S,16S)-6,16-bis(aminomethyl)-4,7,15,18-tetraoxo-11 -(4-oxobutanoyl)-5,8,11,14,17-pentaazahenicosanedioic acid (BEA-MalDap2) which is attached to two Fc sequences
YXEGTXTSDXXIXLDXKAQXEFIEXLIEGGESSGAPPPSGK

SEQ ID NO: 563 - protein, 41 aa, synthetic construct
  SITE 2: note = 2-aminoisobutyric acid
  SITE 6: note = (S)-2-amino-3-(2-fluorophenyl)-2-methylpropanoic acid
  SITE 10: note = 3-(4-pyridyl)-L-alanine
  SITE 11: note = 2-aminoisobutyric acid
  SITE 13: note = Alpha-methyl-L-leucine
  SITE 16: note = Ornithine
  SITE 17: note = Lysine is chemically modified through conjugation of the side chain with epsilon-Lysine-epsilon-Lysine-Gamma-Glutamic acid-CO-(CH2)16-CO2H
  SITE 20: note = 2-aminoisobutyric acid
  SITE 25: note = Alpha-methyl-L-tyrosine
  SITE 31: note = Ornithine
  SITE 41: note = Lysine amide is chemically modified through conjugation of the side chain with 24x Polyethylene glycol-(6S,16S)-6,16-bis(aminomethyl)-4,7,15,18-tetraoxo-11 -(4-oxobutanoyl)-5,8,11,14,17-pentaazahenicosanedioic acid (BEA-MalDap2) which is attached to two Fc sequences
YXEGTXTSDXXIXLDXKAQXEFIEXLIEGGXSSGAPPPSGK

SEQ ID NO: 564 - protein, 41 aa, synthetic construct
  SITE 2: note = 2-aminoisobutyric acid
  SITE 6: note = (S)-2-amino-3-(2-fluorophenyl)-2-methylpropanoic acid
  SITE 10: note = 3-(4-pyridyl)-L-alanine
  SITE 11: note = 2-aminoisobutyric acid
  SITE 13: note = Alpha-methyl-L-leucine
  SITE 16: note = Ornithine
  SITE 17: note = Lysine is chemically modified through conjugation of the side chain with epsilon-Lysine-epsilon-Lysine-Gamma-Glutamic acid-CO-(CH2)16-CO2H
  SITE 20: note = 2-aminoisobutyric acid
  SITE 25: note = Alpha-methyl-L-tyrosine
  SITE 41: note = Lysine amide is chemically modified through conjugation of the side chain with 24x Polyethylene glycol-(6S,16S)-6,16-bis(aminomethyl)-4,7,15,18-tetraoxo-11 -(4-oxobutanoyl)-5,8,11,14,17-pentaazahenicosanedioic acid (BEA-MalDap2) which is attached to two Fc sequences
YXEGTXTSDXXIXLDXKAQXEFIEXLIEGGPPSGAPPPSGK

SEQ ID NO: 565 - protein, 41 aa, synthetic construct
  SITE 2: note = 2-aminoisobutyric acid
  SITE 6: note = (S)-2-amino-3-(2-fluorophenyl)-2-methylpropanoic acid
  SITE 10: note = 3-(4-pyridyl)-L-alanine
  SITE 11: note = 2-aminoisobutyric acid
  SITE 13: note = Alpha-methyl-L-leucine
  SITE 16: note = Ornithine
  SITE 17: note = Lysine is chemically modified through conjugation of the side chain with epsilon-Lysine-epsilon-Lysine-Gamma-Glutamic acid-CO-(CH2)16-CO2H
  SITE 20: note = 2-aminoisobutyric acid
  SITE 25: note = Alpha-methyl-L-tyrosine
  SITE 34: note = 2-aminoisobutyric acid
  SITE 35: note = Ornithine
  SITE 39: note = Ornithine
  SITE 41: note = Lysine amide is chemically modified through conjugation of the side chain with 24x Polyethylene glycol-(6S,16S)-6,16-bis(aminomethyl)-4,7,15,18-tetraoxo-11 -(4-oxobutanoyl)-5,8,11,14,17-pentaazahenicosanedioic acid (BEA-MalDap2) which is attached to two Fc sequences
YXEGTXTSDXXIXLDXKAQXEFIEXLIEGGPPSXXPPPXGK

SEQ ID NO: 566 - protein, 41 aa, synthetic construct
  SITE 2: note = 2-aminoisobutyric acid
  SITE 6: note = (S)-2-amino-3-(2-fluorophenyl)-2-methylpropanoic acid
  SITE 10: note = 3-(4-pyridyl)-L-alanine
  SITE 11: note = 2-aminoisobutyric acid
  SITE 13: note = Alpha-methyl-L-leucine
  SITE 16: note = Ornithine
  SITE 17: note = Lysine is chemically modified through conjugation of the side chain with Gamma-Glutamic acid-CO-(CH2)16-CO2H
  SITE 20: note = 2-aminoisobutyric acid
  SITE 25: note = Alpha-methyl-L-tyrosine
  SITE 41: note = Lysine amide is chemically modified through conjugation of the side chain with 24x Polyethylene glycol-(6S,16S)-6,16-bis(aminomethyl)-4,7,15,18-tetraoxo-11 -(4-oxobutanoyl)-5,8,11,14,17-pentaazahenicosanedioic acid (BEA-MalDap2) which is attached to two Fc sequences
YXEGTXTSDXXIXLDXKAQXEFIEXLIEGSPSSGAPPPGGK

SEQ ID NO: 567 - protein, 41 aa, synthetic construct; identical to SEQ ID NO: 36
  SITE 2: note = 2-aminoisobutyric acid
  SITE 6: note = (S)-2-amino-3-(2-fluorophenyl)-2-methylpropanoic acid
  SITE 10: note = 3-(4-pyridyl)-L-alanine
  SITE 11: note = 2-aminoisobutyric acid
  SITE 13: note = Alpha-methyl-L-leucine
  SITE 16: note = Ornithine
  SITE 17: note = Lysine is chemically modified through conjugation of the side chain with epsilon-Lysine-epsilon-Lysine-Gamma-Glutamic acid-CO-(CH2)16-CO2H
  SITE 20: note = 2-aminoisobutyric acid
  SITE 24: note = Lysine is chemically modified through conjugation of the side chain with 24x Polyethylene glycol-(6S,16S)-6,16-bis(aminomethyl)-4,7,15,18-tetraoxo-11 -(4-oxobutanoyl)-5,8,11,14,17-pentaazahenicosanedioic acid (BEA-MalDap2) which is attached to two Fc sequences
  SITE 25: note = Alpha-methyl-L-tyrosine
  SITE 41: note = Amidated Glycine

SEQ ID NO: 568 - protein, 41 aa, synthetic construct; identical to SEQ ID NO: 37
  SITE 2: note = 2-aminoisobutyric acid
  SITE 6: note = (S)-2-amino-3-(2-fluorophenyl)-2-methylpropanoic acid
  SITE 10: note = 3-(4-pyridyl)-L-alanine
  SITE 11: note = 2-aminoisobutyric acid
  SITE 13: note = Alpha-methyl-L-leucine
  SITE 16: note = Ornithine
  SITE 17: note = Lysine is chemically modified through conjugation of the side chain with epsilon-Lysine-epsilon-Lysine-Gamma-Glutamic acid-CO-(CH2)16-CO2H
  SITE 20: note = 2-aminoisobutyric acid
  SITE 24: note = Lysine is chemically modified through conjugation of the side chain with 24x Polyethylene glycol-(6S,16S)-6,16-bis(aminomethyl)-4,7,15,18-tetraoxo-11 -(4-oxobutanoyl)-5,8,11,14,17-pentaazahenicosanedioic acid (BEA-MalDap2) which is attached to two Fc sequences
  SITE 25: note = Alpha-methyl-L-tyrosine
  SITE 41: note = Amidated Glycine

SEQ ID NO: 569 - protein, 41 aa, synthetic construct; identical to SEQ ID NO: 38
  SITE 2: note = 2-aminoisobutyric acid
  SITE 6: note = (S)-2-amino-3-(2-fluorophenyl)-2-methylpropanoic acid
  SITE 10: note = 3-(4-pyridyl)-L-alanine
  SITE 11: note = 2-aminoisobutyric acid
  SITE 13: note = Alpha-methyl-L-leucine
  SITE 16: note = Ornithine
  SITE 17: note = Lysine is chemically modified through conjugation of the side chain with epsilon-Lysine-epsilon-Lysine-Gamma-Glutamic acid-CO-(CH2)16-CO2H
  SITE 20: note = 2-aminoisobutyric acid
  SITE 24: note = Lysine is chemically modified through conjugation of the side chain with 24x Polyethylene glycol-(6S,16S)-6,16-bis(aminomethyl)-4,7,15,18-tetraoxo-11 -(4-oxobutanoyl)-5,8,11,14,17-pentaazahenicosanedioic acid (BEA-MalDap2) which is attached to two Fc sequences
  SITE 25: note = Alpha-methyl-L-tyrosine
  SITE 31: note = Ornithine
  SITE 41: note = Amidated Glycine

SEQ ID NO: 570 - protein, 41 aa, synthetic construct; identical to SEQ ID NO: 39
  SITE 2: note = 2-aminoisobutyric acid
  SITE 6: note = (S)-2-amino-3-(2-fluorophenyl)-2-methylpropanoic acid
  SITE 10: note = 3-(4-pyridyl)-L-alanine
  SITE 11: note = 2-aminoisobutyric acid
  SITE 13: note = Alpha-methyl-L-leucine
  SITE 16: note = Ornithine
  SITE 17: note = Lysine is chemically modified through conjugation of the side chain with epsilon-Lysine-epsilon-Lysine-Gamma-Glutamic acid-CO-(CH2)16-CO2H
  SITE 20: note = 2-aminoisobutyric acid
  SITE 24: note = Lysine is chemically modified through conjugation of the side chain with 24x Polyethylene glycol-(6S,16S)-6,16-bis(aminomethyl)-4,7,15,18-tetraoxo-11 -(4-oxobutanoyl)-5,8,11,14,17-pentaazahenicosanedioic acid (BEA-MalDap2) which is attached to two Fc sequences
  SITE 25: note = Alpha-methyl-L-tyrosine
  SITE 41: note = Amidated Glycine

SEQ ID NO: 571 - protein, 41 aa, synthetic construct; identical to SEQ ID NO: 40
  SITE 2: note = 2-aminoisobutyric acid
  SITE 6: note = (S)-2-amino-3-(2-fluorophenyl)-2-methylpropanoic acid
  SITE 10: note = 3-(4-pyridyl)-L-alanine
  SITE 11: note = 2-aminoisobutyric acid
  SITE 13: note = Alpha-methyl-L-leucine
  SITE 16: note = Ornithine
  SITE 17: note = Lysine is chemically modified through conjugation of the side chain with epsilon-Lysine-epsilon-Lysine-Gamma-Glutamic acid-CO-(CH2)16-CO2H
  SITE 20: note = 2-aminoisobutyric acid
  SITE 24: note = Lysine is chemically modified through conjugation of the side chain with 24x Polyethylene glycol-(6S,16S)-6,16-bis(aminomethyl)-4,7,15,18-tetraoxo-11 -(4-oxobutanoyl)-5,8,11,14,17-pentaazahenicosanedioic acid (BEA-MalDap2) which is attached to two Fc sequences
  SITE 25: note = Alpha-methyl-L-tyrosine
  SITE 34: note = 2-aminoisobutyric acid
  SITE 35: note = Ornithine
  SITE 39: note = Ornithine
  SITE 41: note = Amidated Glycine

SEQ ID NO: 572 - protein, 41 aa, synthetic construct; identical to SEQ ID NO: 41
  SITE 2: note = 2-aminoisobutyric acid
  SITE 6: note = (S)-2-amino-3-(2-fluorophenyl)-2-methylpropanoic acid
  SITE 10: note = 3-(4-pyridyl)-L-alanine
  SITE 11: note = 2-aminoisobutyric acid
  SITE 13: note = Alpha-methyl-L-leucine
  SITE 16: note = Ornithine
  SITE 17: note = Lysine is chemically modified through conjugation of the side chain with epsilon-Lysine-epsilon-Lysine-Gamma-Glutamic acid-CO-(CH2)16-CO2H
  SITE 20: note = 2-aminoisobutyric acid
  SITE 24: note = Lysine is chemically modified through conjugation of the side chain with 24x Polyethylene glycol-(6S,16S)-6,16-bis(aminomethyl)-4,7,15,18-tetraoxo-11 -(4-oxobutanoyl)-5,8,11,14,17-pentaazahenicosanedioic acid (BEA-MalDap2) which is attached to two Fc sequences
  SITE 25: note = Alpha-methyl-L-tyrosine
  SITE 41: note = Amidated Glycine

SEQ ID NO: 573 - protein, 47 aa, synthetic construct; identical to SEQ ID NO: 505
  SITE 2: note = 2-aminoisobutyric acid
  SITE 6: note = (S)-2-amino-3-(2-fluorophenyl)-2-methylpropanoic acid
  SITE 10: note = 3-(4-pyridyl)-L-alanine
  SITE 11: note = 2-aminoisobutyric acid
  SITE 13: note = Alpha-methyl-L-leucine
  SITE 16: note = Ornithine
  SITE 17: note = Lysine is chemically modified through conjugation of the side chain with epsilon-Lysine-epsilon-Lysine-Gamma-Glutamic acid-CO-(CH2)16-CO2H
  SITE 20: note = 2-aminoisobutyric acid
  SITE 25: note = Alpha-methyl-L-tyrosine
  SITE 47: note = Lysine amide is chemically modified through conjugation of the side chain with (6S,16S)-6,16-bis(aminomethyl)-4,7,15,18-tetraoxo-11-(4-oxo butanoyl)-5,8,11,14,17-pentaazahenicosanedioic acid (BEA-MalDap2) which is attached to two Fc sequences

SEQ ID NO: 574 - protein, 35 aa, synthetic construct
  SITE 2: note = 2-aminoisobutyric acid
  SITE 6: note = (S)-2-amino-3-(2-fluorophenyl)-2-methylpropanoic acid
  SITE 10: note = 3-(4-pyridyl)-L-alanine
  SITE 11: note = 2-aminoisobutyric acid
  SITE 13: note = Alpha-methyl-L-leucine
  SITE 16: note = Ornithine
  SITE 17: note = Lysine is chemically modified through conjugation of the side chain with epsilon-Lysine-epsilon-Lysine-Gamma-Glutamic acid-CO-(CH2)16-CO2H
  SITE 20: note = 2-aminoisobutyric acid
  SITE 25: note = Alpha-methyl-L-tyrosine
  SITE 35: note = Lysine amide is chemically modified through conjugation of the side chain with (6S,16S)-6,16-bis(aminomethyl)-4,7,15,18-tetraoxo-11-(4-oxo butanoyl)-5,8,11,14,17-pentaazahenicosanedioic acid (BEA-MalDap2) which is attached to two Fc sequences
YXEGTXTSDXXIXLDXKAQXEFIEXLIEGGPSSGK

SEQ ID NO: 575 - protein, 31 aa, synthetic construct; identical to SEQ ID NO: 22
  SITE 2: note = 2-aminoisobutyric acid
  SITE 6: note = (S)-2-amino-3-(2-fluorophenyl)-2-methylpropanoic acid
  SITE 10: note = 3-(4-pyridyl)-L-alanine
  SITE 11: note = 2-aminoisobutyric acid
  SITE 13: note = Alpha-methyl-L-leucine
  SITE 16: note = Ornithine
  SITE 17: note = Lysine is chemically modified through conjugation of the side chain with epsilon-Lysine-epsilon-Lysine-Gamma-Glutamic acid-CO-(CH2)16-CO2H
  SITE 20: note = 2-aminoisobutyric acid
  SITE 25: note = Alpha-methyl-L-tyrosine
  SITE 31: note = Residue attached via 24x polyethylene glycol to lysine amide chemically modified through conjugation of the side chain with (6S,16S)-6,16-bis(aminomethyl)-4,7,15,18-tetraoxo-11-(4-oxo butanoyl)-5,8,11,14,17-pentaazahenicosanedioic acid (BEA-MalDap2) which is attached to two Fc sequences

SEQ ID NO: 576 - protein, 32 aa, synthetic construct
  SITE 2: note = 2-aminoisobutyric acid
  SITE 6: note = (S)-2-amino-3-(2-fluorophenyl)-2-methylpropanoic acid
  SITE 10: note = 3-(4-pyridyl)-L-alanine
  SITE 11: note = 2-aminoisobutyric acid
  SITE 13: note = Alpha-methyl-L-leucine
  SITE 16: note = Ornithine
  SITE 17: note = Lysine is chemically modified through conjugation of the side chain with epsilon-Lysine-epsilon-Lysine-Gamma-Glutamic acid-CO-(CH2)16-CO2H
  SITE 20: note = 2-aminoisobutyric acid
  SITE 25: note = Alpha-methyl-L-tyrosine
  SITE 32: note = Lysine amide is chemically modified through conjugation of the side chain with 24x Polyethylene glycol-(6S,16S)-6,16-bis(aminomethyl)-4,7,15,18-tetraoxo-11 -(4-oxobutanoyl)-5,8,11,14,17-pentaazahenicosanedioic acid (BEA-MalDap2) which is attached to two Fc sequences
YXEGTXTSDXXIXLDXKAQXEFIEXLIEGGGK

SEQ ID NO: 577 - protein, 31 aa, synthetic construct; identical to SEQ ID NO: 43
  SITE 2: note = 2-aminoisobutyric acid
  SITE 6: note = (S)-2-amino-3-(2-fluorophenyl)-2-methylpropanoic acid
  SITE 10: note = 3-(4-pyridyl)-L-alanine
  SITE 11: note = 2-aminoisobutyric acid
  SITE 13: note = Alpha-methyl-L-leucine
  SITE 16: note = Ornithine
  SITE 17: note = Lysine is chemically modified through conjugation of the side chain with epsilon-Lysine-epsilon-Lysine-Gamma-Glutamic acid-CO-(CH2)16-CO2H
  SITE 20: note = 2-aminoisobutyric acid
  SITE 24: note = Lysine is chemically modified through conjugation of the side chain with 24x Polyethylene glycol-(6S,16S)-6,16-bis(aminomethyl)-4,7,15,18-tetraoxo-11 -(4-oxobutanoyl)-5,8,11,14,17-pentaazahenicosanedioic acid (BEA-MalDap2) which is attached to two Fc sequences
  SITE 25: note = Alpha-methyl-L-tyrosine
  SITE 31: note = Amidated Glycine

SEQ ID NO: 578 - protein, 34 aa, synthetic construct; identical to SEQ ID NO: 44
  SITE 2: note = 2-aminoisobutyric acid
  SITE 6: note = (S)-2-amino-3-(2-fluorophenyl)-2-methylpropanoic acid
  SITE 10: note = 3-(4-pyridyl)-L-alanine
  SITE 11: note = 2-aminoisobutyric acid
  SITE 13: note = Alpha-methyl-L-leucine
  SITE 16: note = Ornithine
  SITE 17: note = Lysine is chemically modified through conjugation of the side chain with epsilon-Lysine-epsilon-Lysine-Gamma-Glutamic acid-CO-(CH2)16-CO2H
  SITE 20: note = 2-aminoisobutyric acid
  SITE 24: note = Lysine is chemically modified through conjugation of the side chain with 24x Polyethylene glycol-(6S,16S)-6,16-bis(aminomethyl)-4,7,15,18-tetraoxo-11 -(4-oxobutanoyl)-5,8,11,14,17-pentaazahenicosanedioic acid (BEA-MalDap2) which is attached to two Fc sequences
  SITE 25: note = Alpha-methyl-L-tyrosine
  SITE 34: note = Amidated Glycine

SEQ ID NO: 579 - protein, 31 aa, synthetic construct; identical to SEQ ID NO: 45
  SITE 2: note = 2-aminoisobutyric acid
  SITE 6: note = (S)-2-amino-3-(2-fluorophenyl)-2-methylpropanoic acid
  SITE 10: note = 3-(4-pyridyl)-L-alanine
  SITE 11: note = 2-aminoisobutyric acid
  SITE 13: note = Alpha-methyl-L-leucine
  SITE 16: note = Ornithine
  SITE 17: note = Lysine is chemically modified through conjugation of the side chain with epsilon-Lysine-epsilon-Lysine-Gamma-Glutamic acid-CO-(CH2)16-CO2H
  SITE 20: note = 2-aminoisobutyric acid
  SITE 25: note = Alpha-methyl-L-tyrosine
  SITE 28: note = Lysine is chemically modified through conjugation of the side chain with 24x Polyethylene glycol-(6S,16S)-6,16-bis(aminomethyl)-4,7,15,18-tetraoxo-11 -(4-oxobutanoyl)-5,8,11,14,17-pentaazahenicosanedioic acid (BEA-MalDap2) which is attached to two Fc sequences
  SITE 31: note = Amidated Glycine

SEQ ID NO: 580 - protein, 34 aa, synthetic construct; identical to SEQ ID NO: 46
  SITE 2: note = 2-aminoisobutyric acid
  SITE 6: note = (S)-2-amino-3-(2-fluorophenyl)-2-methylpropanoic acid
  SITE 10: note = 3-(4-pyridyl)-L-alanine
  SITE 11: note = 2-aminoisobutyric acid
  SITE 13: note = Alpha-methyl-L-leucine
  SITE 16: note = Ornithine
  SITE 17: note = Lysine is chemically modified through conjugation of the side chain with epsilon-Lysine-epsilon-Lysine-Gamma-Glutamic acid-CO-(CH2)16-CO2H
  SITE 20: note = 2-aminoisobutyric acid
  SITE 25: note = Alpha-methyl-L-tyrosine
  SITE 28: note = Lysine is chemically modified through conjugation of the side chain with 24x Polyethylene glycol-(6S,16S)-6,16-bis(aminomethyl)-4,7,15,18-tetraoxo-11 -(4-oxobutanoyl)-5,8,11,14,17-pentaazahenicosanedioic acid (BEA-MalDap2) which is attached to two Fc sequences
  SITE 34: note = Amidated Glycine

SEQ ID NO: 581 - protein, 55 aa, synthetic construct; identical to SEQ ID NO: 555
  SITE 2: note = 2-aminoisobutyric acid
  SITE 6: note = (S)-2-amino-3-(2-fluorophenyl)-2-methylpropanoic acid
  SITE 10: note = 3-(4-pyridyl)-L-alanine
  SITE 11: note = 2-aminoisobutyric acid
  SITE 13: note = Alpha-methyl-L-leucine
  SITE 16: note = Ornithine
  SITE 17: note = Lysine is chemically modified through conjugation of the side chain with epsilon-Lysine-epsilon-Lysine-Gamma-Glutamic acid-CO-(CH2)16-CO2H
  SITE 20: note = 2-aminoisobutyric acid
  SITE 25: note = Alpha-methyl-L-tyrosine
  SITE 55: note = Lysine amide is chemically modified through conjugation of the side chain with (6S,16S)-6,16-bis(aminomethyl)-4,7,15,18-tetraoxo-11-(4-oxo butanoyl)-5,8,11,14,17-pentaazahenicosanedioic acid (BEA-MalDap2) which is attached to two Fc sequences

SEQ ID NO: 582 - protein, 47 aa, synthetic construct
  SITE 2: note = 2-aminoisobutyric acid
  SITE 6: note = (S)-2-amino-3-(2-fluorophenyl)-2-methylpropanoic acid
  SITE 10: note = 3-(4-pyridyl)-L-alanine
  SITE 11: note = 2-aminoisobutyric acid
  SITE 13: note = Alpha-methyl-L-leucine
  SITE 16: note = Ornithine
  SITE 17: note = Lysine is chemically modified through conjugation of the side chain with epsilon-Lysine-epsilon-Lysine-Gamma-Glutamic acid-CO-(CH2)16-CO2H
  SITE 20: note = 2-aminoisobutyric acid
  SITE 25: note = Alpha-methyl-L-tyrosine
  SITE 47: note = Lysine amide is chemically modified through conjugation of the side chain with (6S,16S)-6,16-bis(aminomethyl)-4,7,15,18-tetraoxo-11-(4-oxo butanoyl)-5,8,11,14,17-pentaazahenicosanedioic acid (BEA-MalDap2) which is attached to two Fc sequences
YXEGTXTSDXXIXLDXKAQXEFIEXLIEGGGGGGGQGGGGQGGGGQK

SEQ ID NO: 583 - protein, 47 aa, synthetic construct
  SITE 2: note = 2-aminoisobutyric acid
  SITE 6: note = (S)-2-amino-3-(2-fluorophenyl)-2-methylpropanoic acid
  SITE 10: note = 3-(4-pyridyl)-L-alanine
  SITE 11: note = 2-aminoisobutyric acid
  SITE 13: note = Alpha-methyl-L-leucine
  SITE 16: note = Ornithine
  SITE 17: note = Lysine is chemically modified through conjugation of the side chain with epsilon-Lysine-epsilon-Lysine-Gamma-Glutamic acid-CO-(CH2)16-CO2H
  SITE 20: note = 2-aminoisobutyric acid
  SITE 25: note = Alpha-methyl-L-tyrosine
  SITE 36: note = 3-(4-pyridyl)-L-alanine
  SITE 41: note = 3-(4-pyridyl)-L-alanine
  SITE 46: note = 3-(4-pyridyl)-L-alanine
  SITE 47: note = Lysine amide is chemically modified through conjugation of the side chain with (6S,16S)-6,16-bis(aminomethyl)-4,7,15,18-tetraoxo-11-(4-oxo butanoyl)-5,8,11,14,17-pentaazahenicosanedioic acid (BEA-MalDap2) which is attached to two Fc sequences
YXEGTXTSDXXIXLDXKAQXEFIEXLIEGGGGGGGXGGGGXGGGGXK

SEQ ID NO: 584 - protein, 35 aa, synthetic construct; identical to SEQ ID NO: 574
  SITE 2: note = 2-aminoisobutyric acid
  SITE 6: note = (S)-2-amino-3-(2-fluorophenyl)-2-methylpropanoic acid
  SITE 10: note = 3-(4-pyridyl)-L-alanine
  SITE 11: note = 2-aminoisobutyric acid
  SITE 13: note = Alpha-methyl-L-leucine
  SITE 16: note = Ornithine
  SITE 17: note = Lysine is chemically modified through conjugation of the side chain with epsilon-Lysine-epsilon-Lysine-Gamma-Glutamic acid-CO-(CH2)16-CO2H
  SITE 20: note = 2-aminoisobutyric acid
  SITE 25: note = Alpha-methyl-L-tyrosine
  SITE 35: note = Lysine amide is chemically modified through conjugation of the side chain with 24x Polyethylene glycol-(6S,16S)-6,16-bis(aminomethyl)-4,7,15,18-tetraoxo-11 -(4-oxobutanoyl)-5,8,11,14,17-pentaazahenicosanedioic acid (BEA-MalDap2) which is attached to two Fc sequences

SEQ ID NO: 585 - protein, 31 aa, synthetic construct; identical to SEQ ID NO: 43
  SITE 2: note = 2-aminoisobutyric acid
  SITE 6: note = (S)-2-amino-3-(2-fluorophenyl)-2-methylpropanoic acid
  SITE 10: note = 3-(4-pyridyl)-L-alanine
  SITE 11: note = 2-aminoisobutyric acid
  SITE 13: note = Alpha-methyl-L-leucine
  SITE 16: note = Ornithine
  SITE 17: note = Lysine is chemically modified through conjugation of the side chain with (2-[2-(2-amino-ethoxy)-ethoxy]-acetyl)2-Gamma-Glutamic acid-CO-(CH2)16-CO2H
  SITE 20: note = 2-aminoisobutyric acid
  SITE 24: note = Lysine is chemically modified through conjugation of the side chain with 24x Polyethylene glycol-(6S,16S)-6,16-bis(aminomethyl)-4,7,15,18-tetraoxo-11 -(4-oxobutanoyl)-5,8,11,14,17-pentaazahenicosanedioic acid (BEA-MalDap2) which is attached to two Fc sequences
  SITE 25: note = Alpha-methyl-L-tyrosine
  SITE 31: note = Amidated Glycine

SEQ ID NO: 586 - protein, 34 aa, synthetic construct; identical to SEQ ID NO: 44
  SITE 2: note = 2-aminoisobutyric acid
  SITE 6: note = (S)-2-amino-3-(2-fluorophenyl)-2-methylpropanoic acid
  SITE 10: note = 3-(4-pyridyl)-L-alanine
  SITE 11: note = 2-aminoisobutyric acid
  SITE 13: note = Alpha-methyl-L-leucine
  SITE 16: note = Ornithine
  SITE 17: note = Lysine is chemically modified through conjugation of the side chain with (2-[2-(2-amino-ethoxy)-ethoxy]-acetyl)2-Gamma-Glutamic acid-CO-(CH2)16-CO2H
  SITE 20: note = 2-aminoisobutyric acid
  SITE 24: note = Lysine is chemically modified through conjugation of the side chain with 24x Polyethylene glycol-(6S,16S)-6,16-bis(aminomethyl)-4,7,15,18-tetraoxo-11 -(4-oxobutanoyl)-5,8,11,14,17-pentaazahenicosanedioic acid (BEA-MalDap2) which is attached to two Fc sequences
  SITE 25: note = Alpha-methyl-L-tyrosine
  SITE 34: note = Amidated Glycine

SEQ ID NO: 587 - protein, 31 aa, synthetic construct; identical to SEQ ID NO: 45
  SITE 2: note = 2-aminoisobutyric acid
  SITE 6: note = (S)-2-amino-3-(2-fluorophenyl)-2-methylpropanoic acid
  SITE 10: note = 3-(4-pyridyl)-L-alanine
  SITE 11: note = 2-aminoisobutyric acid
  SITE 13: note = Alpha-methyl-L-leucine
  SITE 16: note = Ornithine
  SITE 17: note = Lysine is chemically modified through conjugation of the side chain with (2-[2-(2-amino-ethoxy)-ethoxy]-acetyl)2-Gamma-Glutamic acid-CO-(CH2)16-CO2H
  SITE 20: note = 2-aminoisobutyric acid
  SITE 25: note = Alpha-methyl-L-tyrosine
  SITE 28: note = Lysine is chemically modified through conjugation of the side chain with 24x Polyethylene glycol-(6S,16S)-6,16-bis(aminomethyl)-4,7,15,18-tetraoxo-11 -(4-oxobutanoyl)-5,8,11,14,17-pentaazahenicosanedioic acid (BEA-MalDap2) which is attached to two Fc sequences
  SITE 31: note = Amidated Glycine

SEQ ID NO: 588 - protein, 34 aa, synthetic construct; identical to SEQ ID NO: 46
  SITE 2: note = 2-aminoisobutyric acid
  SITE 6: note = (S)-2-amino-3-(2-fluorophenyl)-2-methylpropanoic acid
  SITE 10: note = 3-(4-pyridyl)-L-alanine
  SITE 11: note = 2-aminoisobutyric acid
  SITE 13: note = Alpha-methyl-L-leucine
  SITE 16: note = Ornithine
  SITE 17: note = Lysine is chemically modified through conjugation of the side chain with (2-[2-(2-amino-ethoxy)-ethoxy]-acetyl)2-Gamma-Glutamic acid-CO-(CH2)16-CO2H
  SITE 20: note = 2-aminoisobutyric acid
  SITE 25: note = Alpha-methyl-L-tyrosine
  SITE 28: note = Lysine is chemically modified through conjugation of the side chain with 24x Polyethylene glycol-(6S,16S)-6,16-bis(aminomethyl)-4,7,15,18-tetraoxo-11 -(4-oxobutanoyl)-5,8,11,14,17-pentaazahenicosanedioic acid (BEA-MalDap2) which is attached to two Fc sequences
  SITE 34: note = Amidated Glycine

SEQ ID NO: 589 - protein, 35 aa, synthetic construct; identical to SEQ ID NO: 574
  SITE 2: note = 2-aminoisobutyric acid
  SITE 6: note = (S)-2-amino-3-(2-fluorophenyl)-2-methylpropanoic acid
  SITE 10: note = 3-(4-pyridyl)-L-alanine
  SITE 11: note = 2-aminoisobutyric acid
  SITE 13: note = Alpha-methyl-L-leucine
  SITE 16: note = Ornithine
  SITE 17: note = Lysine is chemically modified through conjugation of the side chain with (2-[2-(2-amino-ethoxy)-ethoxy]-acetyl)2-Gamma-Glutamic acid-CO-(CH2)16-CO2H
  SITE 20: note = 2-aminoisobutyric acid
  SITE 25: note = Alpha-methyl-L-tyrosine
  SITE 35: note = Lysine amide is chemically modified through conjugation of the side chain with 24x Polyethylene glycol-(6S,16S)-6,16-bis(aminomethyl)-4,7,15,18-tetraoxo-11 -(4-oxobutanoyl)-5,8,11,14,17-pentaazahenicosanedioic acid (BEA-MalDap2) which is attached to two Fc sequences

SEQ ID NO: 590 - protein, 31 aa, synthetic construct; identical to SEQ ID NO: 22
  SITE 2: note = 2-aminoisobutyric acid
  SITE 6: note = (S)-2-amino-3-(2-fluorophenyl)-2-methylpropanoic acid
  SITE 10: note = 3-(4-pyridyl)-L-alanine
  SITE 11: note = 2-aminoisobutyric acid
  SITE 13: note = Alpha-methyl-L-leucine
  SITE 16: note = Ornithine
  SITE 17: note = Lysine is chemically modified through conjugation of the side chain with (2-[2-(2-amino-ethoxy)-ethoxy]-acetyl)2-Gamma-Glutamic acid-CO-(CH2)16-CO2H
  SITE 20: note = 2-aminoisobutyric acid
  SITE 25: note = Alpha-methyl-L-tyrosine
  SITE 31: note = Residue attached via 24x polyethylene glycol to lysine amide chemically modified through conjugation of the side chain with (6S,16S)-6,16-bis(aminomethyl)-4,7,15,18-tetraoxo-11-(4-oxo butanoyl)-5,8,11,14,17-pentaazahenicosanedioic acid (BEA-MalDap2) which is attached to two Fc sequences

SEQ ID NO: 591 - protein, 40 aa, synthetic construct
  SITE 2: note = 2-aminoisobutyric acid
  SITE 6: note = (S)-2-amino-3-(2-fluorophenyl)-2-methylpropanoic acid
  SITE 10: note = 3-(4-pyridyl)-L-alanine
  SITE 11: note = 2-aminoisobutyric acid
  SITE 13: note = Alpha-methyl-L-leucine
  SITE 16: note = Ornithine
  SITE 17: note = Lysine is chemically modified through conjugation of the side chain with (2-[2-(2-amino-ethoxy)-ethoxy]-acetyl)2-Gamma-Glutamic acid-CO-(CH2)16-CO2H
  SITE 20: note = 2-aminoisobutyric acid
  SITE 25: note = Alpha-methyl-L-tyrosine
  SITE 40: note = Lysine amide is chemically modified through conjugation of the side chain with 24x Polyethylene glycol-(6S,16S)-6,16-bis(aminomethyl)-4,7,15,18-tetraoxo-11 -(4-oxobutanoyl)-5,8,11,14,17-pentaazahenicosanedioic acid (BEA-MalDap2) which is attached to two Fc sequences
YXEGTXTSDXXIXLDXKAQXEFIEXLIEGSPSSGAPPPSK

SEQ ID NO: 592 - protein, 40 aa, synthetic construct; identical to SEQ ID NO: 591
  SITE 2: note = 2-aminoisobutyric acid
  SITE 6: note = (S)-2-amino-3-(2-fluorophenyl)-2-methylpropanoic acid
  SITE 10: note = 3-(4-pyridyl)-L-alanine
  SITE 11: note = 2-aminoisobutyric acid
  SITE 13: note = Alpha-methyl-L-leucine
  SITE 16: note = Ornithine
  SITE 17: note = Lysine is chemically modified through conjugation of the side chain with epsilon-Lysine-epsilon-Lysine-Gamma-Glutamic acid-CO-(CH2)16-CO2H
  SITE 20: note = 2-aminoisobutyric acid
  SITE 25: note = Alpha-methyl-L-tyrosine
  SITE 40: note = Lysine amide is chemically modified through conjugation of the side chain with 24x Polyethylene glycol-(6S,16S)-6,16-bis(aminomethyl)-4,7,15,18-tetraoxo-11 -(4-oxobutanoyl)-5,8,11,14,17-pentaazahenicosanedioic acid (BEA-MalDap2) which is attached to two Fc sequences

SEQ ID NO: 593 - protein, 40 aa, synthetic construct; identical to SEQ ID NO: 474
  SITE 2: note = 2-aminoisobutyric acid
  SITE 6: note = (S)-2-amino-3-(2-fluorophenyl)-2-methylpropanoic acid
  SITE 10: note = 3-(4-pyridyl)-L-alanine
  SITE 11: note = 2-aminoisobutyric acid
  SITE 13: note = Alpha-methyl-L-leucine
  SITE 17: note = Lysine is chemically modified through conjugation of the side chain with epsilon-Lysine-epsilon-Lysine-Gamma-Glutamic acid-CO-(CH2)16-CO2H
  SITE 20: note = 2-aminoisobutyric acid
  SITE 25: note = Alpha-methyl-L-tyrosine
  SITE 40: note = Lysine amide is chemically modified through conjugation of the side chain with 24x Polyethylene glycol-(6S,16S)-6,16-bis(aminomethyl)-4,7,15,18-tetraoxo-11 -(4-oxobutanoyl)-5,8,11,14,17-pentaazahenicosanedioic acid (BEA-MalDap2) which is attached to two Fc sequences

SEQ ID NO: 594 - protein, 40 aa, synthetic construct
  SITE 2: note = 2-aminoisobutyric acid
  SITE 6: note = (S)-2-amino-3-(2-fluorophenyl)-2-methylpropanoic acid
  SITE 10: note = 3-(4-pyridyl)-L-alanine
  SITE 11: note = 2-aminoisobutyric acid
  SITE 13: note = Alpha-methyl-L-leucine
  SITE 16: note = Ornithine
  SITE 17: note = Lysine is chemically modified through conjugation of the side chain with (2-[2-(2-amino-ethoxy)-ethoxy]-acetyl)2-Gamma-Glutamic acid-CO-(CH2)16-CO2H
  SITE 20: note = 2-aminoisobutyric acid
  SITE 25: note = Alpha-methyl-L-tyrosine
  SITE 40: note = Lysine amide is chemically modified through conjugation of the side chain with 24x Polyethylene glycol-(6S,16S)-6,16-bis(aminomethyl)-4,7,15,18-tetraoxo-11 -(4-oxobutanoyl)-5,8,11,14,17-pentaazahenicosanedioic acid (BEA-MalDap2) which is attached to two Fc sequences
YXEGTXTSDXXIXLDXKAQXEFIEXLIEGGPSSGAPPPSK

SEQ ID NO: 595 - protein, 40 aa, synthetic construct; identical to SEQ ID NO: 594
  SITE 2: note = 2-aminoisobutyric acid
  SITE 6: note = (S)-2-amino-3-(2-fluorophenyl)-2-methylpropanoic acid
  SITE 10: note = 3-(4-pyridyl)-L-alanine
  SITE 11: note = 2-aminoisobutyric acid
  SITE 13: note = Alpha-methyl-L-leucine
  SITE 16: note = Ornithine
  SITE 17: note = Lysine is chemically modified through conjugation of the side chain with epsilon-Lysine-epsilon-Lysine-Gamma-Glutamic acid-CO-(CH2)16-CO2H
  SITE 20: note = 2-aminoisobutyric acid
  SITE 25: note = Alpha-methyl-L-tyrosine
  SITE 40: note = Lysine amide is chemically modified through conjugation of the side chain with 24x Polyethylene glycol-(6S,16S)-6,16-bis(aminomethyl)-4,7,15,18-tetraoxo-11 -(4-oxobutanoyl)-5,8,11,14,17-pentaazahenicosanedioic acid (BEA-MalDap2) which is attached to two Fc sequences

SEQ ID NO: 596 - protein, 40 aa, synthetic construct
  SITE 2: note = 2-aminoisobutyric acid
  SITE 6: note = (S)-2-amino-3-(2-fluorophenyl)-2-methylpropanoic acid
  SITE 10: note = 3-(4-pyridyl)-L-alanine
  SITE 11: note = 2-aminoisobutyric acid
  SITE 13: note = Alpha-methyl-L-leucine
  SITE 17: note = Lysine is chemically modified through conjugation of the side chain with epsilon-Lysine-epsilon-Lysine-Gamma-Glutamic acid-CO-(CH2)16-CO2H
  SITE 20: note = 2-aminoisobutyric acid
  SITE 25: note = Alpha-methyl-L-tyrosine
  SITE 40: note = Lysine amide is chemically modified through conjugation of the side chain with 24x Polyethylene glycol-(6S,16S)-6,16-bis(aminomethyl)-4,7,15,18-tetraoxo-11 -(4-oxobutanoyl)-5,8,11,14,17-pentaazahenicosanedioic acid (BEA-MalDap2) which is attached to two Fc sequences
YXEGTXTSDXXIXLDEKAQXEFIEXLIEGGPSSGAPPPSK

SEQ ID NO: 597 - protein, 40 aa, synthetic construct; identical to SEQ ID NO: 591
  SITE 2: note = 2-aminoisobutyric acid
  SITE 6: note = (S)-2-amino-3-(2-fluorophenyl)-2-methylpropanoic acid
  SITE 10: note = 3-(4-pyridyl)-L-alanine
  SITE 11: note = 2-aminoisobutyric acid
  SITE 13: note = Alpha-methyl-L-leucine
  SITE 16: note = Ornithine
  SITE 17: note = Lysine is chemically modified through conjugation of the side chain with epsilon-Lysine-epsilon-Lysine-Gamma-Glutamic acid-CO-(CH2)16-CO2H
  SITE 20: note = 2-aminoisobutyric acid
  SITE 24: note = D-Glutamic acid
  SITE 25: note = Alpha-methyl-L-tyrosine
  SITE 40: note = Lysine amide is chemically modified through conjugation of the side chain with 24x Polyethylene glycol-(6S,16S)-6,16-bis(aminomethyl)-4,7,15,18-tetraoxo-11 -(4-oxobutanoyl)-5,8,11,14,17-pentaazahenicosanedioic acid (BEA-MalDap2) which is attached to two Fc sequences

SEQ ID NO: 598 - protein, 32 aa, synthetic construct; identical to SEQ ID NO: 576
  SITE 2: note = 2-aminoisobutyric acid
  SITE 6: note = (S)-2-amino-3-(2-fluorophenyl)-2-methylpropanoic acid
  SITE 10: note = 3-(4-pyridyl)-L-alanine
  SITE 11: note = 2-aminoisobutyric acid
  SITE 13: note = Alpha-methyl-L-leucine
  SITE 16: note = Ornithine
  SITE 17: note = Lysine is chemically modified through conjugation of the side chain with epsilon-Lysine-epsilon-Lysine-Gamma-Glutamic acid-CO-(CH2)16-CO2H
  SITE 20: note = 2-aminoisobutyric acid
  SITE 24: note = D-Glutamic acid
  SITE 25: note = Alpha-methyl-L-tyrosine
  SITE 32: note = Lysine amide is chemically modified through conjugation of the side chain with 24x Polyethylene glycol-(6S,16S)-6,16-bis(aminomethyl)-4,7,15,18-tetraoxo-11 -(4-oxobutanoyl)-5,8,11,14,17-pentaazahenicosanedioic acid (BEA-MalDap2) which is attached to two Fc sequences

SEQ ID NO: 599 - protein, 40 aa, synthetic construct
  SITE 2: note = 2-aminoisobutyric acid
  SITE 6: note = (S)-2-amino-3-(2-fluorophenyl)-2-methylpropanoic acid
  SITE 10: note = 3-(4-pyridyl)-L-alanine
  SITE 11: note = 2-aminoisobutyric acid
  SITE 13: note = Alpha-methyl-L-leucine
  SITE 16: note = Ornithine
  SITE 17: note = Lysine is chemically modified through conjugation of the side chain with epsilon-Lysine-epsilon-Lysine-Gamma-Glutamic acid-CO-(CH2)16-CO2H
  SITE 20: note = 2-aminoisobutyric acid
  SITE 25: note = Alpha-methyl-L-tyrosine
  SITE 31: note = Ornithine
  SITE 40: note = Lysine amide is chemically modified through conjugation of the side chain with 24x Polyethylene glycol-(6S,16S)-6,16-bis(aminomethyl)-4,7,15,18-tetraoxo-11 -(4-oxobutanoyl)-5,8,11,14,17-pentaazahenicosanedioic acid (BEA-MalDap2) which is attached to two Fc sequences
YXEGTXTSDXXIXLDXKAQXEFIEXLIEGGXSSGAPPPSK

SEQ ID NO: 600 - protein, 40 aa, synthetic construct; identical to SEQ ID NO: 599
  SITE 2: note = 2-aminoisobutyric acid
  SITE 6: note = (S)-2-amino-3-(2-fluorophenyl)-2-methylpropanoic acid
  SITE 10: note = 3-(4-pyridyl)-L-alanine
  SITE 11: note = 2-aminoisobutyric acid
  SITE 13: note = Alpha-methyl-L-leucine
  SITE 16: note = Ornithine
  SITE 17: note = Lysine is chemically modified through conjugation of the side chain with (2-[2-(2-amino-ethoxy)-ethoxy]-acetyl)2-Gamma-Glutamic acid-CO-(CH2)16-CO2H
  SITE 20: note = 2-aminoisobutyric acid
  SITE 25: note = Alpha-methyl-L-tyrosine
  SITE 31: note = Ornithine
  SITE 40: note = Lysine amide is chemically modified through conjugation of the side chain with 24x Polyethylene glycol-(6S,16S)-6,16-bis(aminomethyl)-4,7,15,18-tetraoxo-11 -(4-oxobutanoyl)-5,8,11,14,17-pentaazahenicosanedioic acid (BEA-MalDap2) which is attached to two Fc sequences

SEQ ID NO: 601 - protein, 32 aa, synthetic construct
  SITE 2: note = 2-aminoisobutyric acid
  SITE 6: note = (S)-2-amino-3-(2-fluorophenyl)-2-methylpropanoic acid
  SITE 10: note = 3-(4-pyridyl)-L-alanine
  SITE 11: note = 2-aminoisobutyric acid
  SITE 13: note = Alpha-methyl-L-leucine
  SITE 16: note = Ornithine
  SITE 17: note = Lysine is chemically modified through conjugation of the side chain with epsilon-Lysine-epsilon-Lysine-Gamma-Glutamic acid-CO-(CH2)16-CO2H
  SITE 20: note = 2-aminoisobutyric acid
  SITE 25: note = Alpha-methyl-L-tyrosine
  SITE 31: note = Ornithine
  SITE 32: note = Lysine amide is chemically modified through conjugation of the side chain with 24x Polyethylene glycol-(6S,16S)-6,16-bis(aminomethyl)-4,7,15,18-tetraoxo-11 -(4-oxobutanoyl)-5,8,11,14,17-pentaazahenicosanedioic acid (BEA-MalDap2) which is attached to two Fc sequences
YXEGTXTSDXXIXLDXKAQXEFIEXLIEGGXK

SEQ ID NO: 602 - protein, 32 aa, synthetic construct; identical to SEQ ID NO: 601
  SITE 2: note = 2-aminoisobutyric acid
  SITE 6: note = (S)-2-amino-3-(2-fluorophenyl)-2-methylpropanoic acid
  SITE 10: note = 3-(4-pyridyl)-L-alanine
  SITE 11: note = 2-aminoisobutyric acid
  SITE 13: note = Alpha-methyl-L-leucine
  SITE 16: note = Ornithine
  SITE 17: note = Lysine is chemically modified through conjugation of the side chain with (2-[2-(2-amino-ethoxy)-ethoxy]-acetyl)2-Gamma-Glutamic acid-CO-(CH2)16-CO2H
  SITE 20: note = 2-aminoisobutyric acid
  SITE 25: note = Alpha-methyl-L-tyrosine
  SITE 31: note = Ornithine
  SITE 32: note = Lysine amide is chemically modified through conjugation of the side chain with 24x Polyethylene glycol-(6S,16S)-6,16-bis(aminomethyl)-4,7,15,18-tetraoxo-11 -(4-oxobutanoyl)-5,8,11,14,17-pentaazahenicosanedioic acid (BEA-MalDap2) which is attached to two Fc sequences

SEQ ID NO: 603 - protein, 40 aa, synthetic construct
  SITE 2: note = 2-aminoisobutyric acid
  SITE 6: note = (S)-2-amino-3-(2-fluorophenyl)-2-methylpropanoic acid
  SITE 10: note = 3-(4-pyridyl)-L-alanine
  SITE 11: note = 2-aminoisobutyric acid
  SITE 13: note = Alpha-methyl-L-leucine
  SITE 16: note = Ornithine
  SITE 17: note = Lysine is chemically modified through conjugation of the side chain with epsilon-Lysine-epsilon-Lysine-Gamma-Glutamic acid-CO-(CH2)16-CO2H
  SITE 20: note = 2-aminoisobutyric acid
  SITE 21: note = Ornithine
  SITE 25: note = Alpha-methyl-L-tyrosine
  SITE 40: note = Lysine amide is chemically modified through conjugation of the side chain with 24x Polyethylene glycol-(6S,16S)-6,16-bis(aminomethyl)-4,7,15,18-tetraoxo-11 -(4-oxobutanoyl)-5,8,11,14,17-pentaazahenicosanedioic acid (BEA-MalDap2) which is attached to two Fc sequences
YXEGTXTSDXXIXLDXKAQXXFIEXLIEGSPSSGAPPPSK

SEQ ID NO: 604 - protein, 40 aa, synthetic construct; identical to SEQ ID NO: 603
  SITE 2: note = 2-aminoisobutyric acid
  SITE 6: note = (S)-2-amino-3-(2-fluorophenyl)-2-methylpropanoic acid
  SITE 10: note = 3-(4-pyridyl)-L-alanine
  SITE 11: note = 2-aminoisobutyric acid
  SITE 13: note = Alpha-methyl-L-leucine
  SITE 16: note = Ornithine
  SITE 17: note = Lysine is chemically modified through conjugation of the side chain with (2-[2-(2-amino-ethoxy)-ethoxy]-acetyl)2-Gamma-Glutamic acid-CO-(CH2)16-CO2H
  SITE 20: note = 2-aminoisobutyric acid
  SITE 21: note = Ornithine
  SITE 25: note = Alpha-methyl-L-tyrosine
  SITE 40: note = Lysine amide is chemically modified through conjugation of the side chain with 24x Polyethylene glycol-(6S,16S)-6,16-bis(aminomethyl)-4,7,15,18-tetraoxo-11 -(4-oxobutanoyl)-5,8,11,14,17-pentaazahenicosanedioic acid (BEA-MalDap2) which is attached to two Fc sequences

SEQ ID NO: 605 - protein, 40 aa, synthetic construct
  SITE 2: note = 2-aminoisobutyric acid
  SITE 6: note = (S)-2-amino-3-(2-fluorophenyl)-2-methylpropanoic acid
  SITE 10: note = 3-(4-pyridyl)-L-alanine
  SITE 11: note = 2-aminoisobutyric acid
  SITE 13: note = Alpha-methyl-L-leucine
  SITE 16: note = Ornithine
  SITE 17: note = Lysine is chemically modified through conjugation of the side chain with (2-[2-(2-amino-ethoxy)-ethoxy]-acetyl)2-Gamma-Glutamic acid-CO-(CH2)16-CO2H
  SITE 20: note = 2-aminoisobutyric acid
  SITE 25: note = Alpha-methyl-L-tyrosine
  SITE 40: note = Lysine amide is chemically modified through conjugation of the side chain with 24x Polyethylene glycol-(6S,16S)-6,16-bis(aminomethyl)-4,7,15,18-tetraoxo-11 -(4-oxobutanoyl)-5,8,11,14,17-pentaazahenicosanedioic acid (BEA-MalDap2) which is attached to two Fc sequences
YXEGTXTSDXXIXLDXKAQXEFIQXLIEGSPSSGAPPPSK

SEQ ID NO: 606 - protein, 40 aa, synthetic construct; identical to SEQ ID NO: 605
  SITE 2: note = 2-aminoisobutyric acid
  SITE 6: note = (S)-2-amino-3-(2-fluorophenyl)-2-methylpropanoic acid
  SITE 10: note = 3-(4-pyridyl)-L-alanine
  SITE 11: note = 2-aminoisobutyric acid
  SITE 13: note = Alpha-methyl-L-leucine
  SITE 16: note = Ornithine
  SITE 17: note = Lysine is chemically modified through conjugation of the side chain with epsilon-Lysine-epsilon-Lysine-Gamma-Glutamic acid-CO-(CH2)16-CO2H
  SITE 20: note = 2-aminoisobutyric acid
  SITE 25: note = Alpha-methyl-L-tyrosine
  SITE 40: note = Lysine amide is chemically modified through conjugation of the side chain with 24x Polyethylene glycol-(6S,16S)-6,16-bis(aminomethyl)-4,7,15,18-tetraoxo-11 -(4-oxobutanoyl)-5,8,11,14,17-pentaazahenicosanedioic acid (BEA-MalDap2) which is attached to two Fc sequences

SEQ ID NO: 607 - protein, 40 aa, synthetic construct; identical to SEQ ID NO: 591
  SITE 2: note = 2-aminoisobutyric acid
  SITE 6: note = (S)-2-amino-3-(2-fluorophenyl)-2-methylpropanoic acid
  SITE 10: note = 3-(4-pyridyl)-L-alanine
  SITE 11: note = 2-aminoisobutyric acid
  SITE 13: note = Alpha-methyl-L-leucine
  SITE 16: note = Ornithine
  SITE 17: note = Lysine is chemically modified through conjugation of the side chain with epsilon-Lysine-epsilon-Lysine-Gamma-Glutamic acid-CO-(CH2)16-CO2H
  SITE 20: note = 2-aminoisobutyric acid
  SITE 25: note = Alpha-methyl-L-tyrosine
  SITE 40: note = Lysine amide is chemically modified through conjugation of the side chain with (2-[2-(2-amino-ethoxy)-ethoxy]-acetyl)6-GPAPAPAPAPAPA-(6S,1 6S)-6,16-bis(aminomethyl)-4,7,15,18-tetraoxo-11-(4-oxobutan oyl)-5,8,11,14,17-pentaazahenicosanedioic acid (BEA-MalDap2) which is attached to two Fc sequences

SEQ ID NO: 608 - protein, 40 aa, synthetic construct; identical to SEQ ID NO: 591
  SITE 2: note = 2-aminoisobutyric acid
  SITE 6: note = (S)-2-amino-3-(2-fluorophenyl)-2-methylpropanoic acid
  SITE 10: note = 3-(4-pyridyl)-L-alanine
  SITE 11: note = 2-aminoisobutyric acid
  SITE 13: note = Alpha-methyl-L-leucine
  SITE 16: note = Ornithine
  SITE 17: note = Lysine is chemically modified through conjugation of the side chain with epsilon-Lysine-epsilon-Lysine-Gamma-Glutamic acid-CO-(CH2)16-CO2H
  SITE 20: note = 2-aminoisobutyric acid
  SITE 24: note = D-Glutamic acid
  SITE 25: note = Alpha-methyl-L-tyrosine
  SITE 40: note = Lysine amide is chemically modified through conjugation of the side chain with (2-[2-(2-amino-ethoxy)-ethoxy]-acetyl)6-GPAPAPAPAPAPA-(6S,1 6S)-6,16-bis(aminomethyl)-4,7,15,18-tetraoxo-11-(4-oxobutan oyl)-5,8,11,14,17-pentaazahenicosanedioic acid (BEA-MalDap2) which is attached to two Fc sequences

SEQ ID NO: 609 - protein, 40 aa, synthetic construct; identical to SEQ ID NO: 591
  SITE 2: note = 2-aminoisobutyric acid
  SITE 6: note = (S)-2-amino-3-(2-fluorophenyl)-2-methylpropanoic acid
  SITE 10: note = 3-(4-pyridyl)-L-alanine
  SITE 11: note = 2-aminoisobutyric acid
  SITE 13: note = Alpha-methyl-L-leucine
  SITE 16: note = Ornithine
  SITE 17: note = Lysine is chemically modified through conjugation of the side chain with (2-[2-(2-amino-ethoxy)-ethoxy]-acetyl)2-Gamma-Glutamic acid-CO-(CH2)16-CO2H
  SITE 20: note = 2-aminoisobutyric acid
  SITE 25: note = Alpha-methyl-L-tyrosine
  SITE 40: note = Lysine amide is chemically modified through conjugation of the side chain with (2-[2-(2-amino-ethoxy)-ethoxy]-acetyl)4-GPAPAPAPAPAPA-(6S,1 6S)-6,16-bis(aminomethyl)-4,7,15,18-tetraoxo-11-(4-oxobutan oyl)-5,8,11,14,17-pentaazahenicosanedioic acid (BEA-MalDap2) which is attached to two Fc sequences

SEQ ID NO: 610 - protein, 40 aa, synthetic construct; identical to SEQ ID NO: 591
  SITE 2: note = 2-aminoisobutyric acid
  SITE 6: note = (S)-2-amino-3-(2-fluorophenyl)-2-methylpropanoic acid
  SITE 10: note = 3-(4-pyridyl)-L-alanine
  SITE 11: note = 2-aminoisobutyric acid
  SITE 13: note = Alpha-methyl-L-leucine
  SITE 16: note = Ornithine
  SITE 17: note = Lysine is chemically modified through conjugation of the side chain with (2-[2-(2-amino-ethoxy)-ethoxy]-acetyl)2-Gamma-Glutamic acid-CO-(CH2)16-CO2H
  SITE 20: note = 2-aminoisobutyric acid
  SITE 25: note = Alpha-methyl-L-tyrosine
  SITE 40: note = Lysine amide is chemically modified through conjugation of the side chain with (2-[2-(2-amino-ethoxy)-ethoxy]-acetyl)4-GPAPAPAPA-(6S,16S)- 6,16-bis(aminomethyl)-4,7,15,18-tetraoxo-11-(4-oxobutanoyl) -5,8,11,14,17-pentaazahenicosanedioic acid (BEA-MalDap2) which is attached to two Fc sequences

SEQ ID NO: 611 - protein, 40 aa, synthetic construct; identical to SEQ ID NO: 591
  SITE 2: note = 2-aminoisobutyric acid
  SITE 6: note = (S)-2-amino-3-(2-fluorophenyl)-2-methylpropanoic acid
  SITE 10: note = 3-(4-pyridyl)-L-alanine
  SITE 11: note = 2-aminoisobutyric acid
  SITE 13: note = Alpha-methyl-L-leucine
  SITE 16: note = Ornithine
  SITE 17: note = Lysine is chemically modified through conjugation of the side chain with (2-[2-(2-amino-ethoxy)-ethoxy]-acetyl)2-Gamma-Glutamic acid-CO-(CH2)16-CO2H
  SITE 20: note = 2-aminoisobutyric acid
  SITE 25: note = Alpha-methyl-L-tyrosine
  SITE 40: note = Lysine amide is chemically modified through conjugation of the side chain with (2-[2-(2-amino-ethoxy)-ethoxy]-acetyl)4-GPAPA-(6S,16S)-6,16 -bis(aminomethyl)-4,7,15,18-tetraoxo-11-(4-oxobutanoyl)-5,8 ,11,14,17-pentaazahenicosanedioic acid (BEA-MalDap2) which is attached to two Fc sequences

SEQ ID NO: 612 - protein, 40 aa, synthetic construct; identical to SEQ ID NO: 591
  SITE 2: note = 2-aminoisobutyric acid
  SITE 6: note = (S)-2-amino-3-(2-fluorophenyl)-2-methylpropanoic acid
  SITE 10: note = 3-(4-pyridyl)-L-alanine
  SITE 11: note = 2-aminoisobutyric acid
  SITE 13: note = Alpha-methyl-L-leucine
  SITE 16: note = Ornithine
  SITE 17: note = Lysine is chemically modified through conjugation of the side chain with (2-[2-(2-amino-ethoxy)-ethoxy]-acetyl)2-Gamma-Glutamic acid-CO-(CH2)16-CO2H
  SITE 20: note = 2-aminoisobutyric acid
  SITE 25: note = Alpha-methyl-L-tyrosine
  SITE 40: note = Lysine amide is chemically modified through conjugation of the side chain with (2-[2-(2-amino-ethoxy)-ethoxy]-acetyl)6-GPAPAPAPAPAPA-(6S,1 6S)-6,16-bis(aminomethyl)-4,7,15,18-tetraoxo-11-(4-oxobutan oyl)-5,8,11,14,17-pentaazahenicosanedioic acid (BEA-MalDap2) which is attached to two Fc sequences

SEQ ID NO: 613 - protein, 40 aa, synthetic construct; identical to SEQ ID NO: 591
  SITE 2: note = 2-aminoisobutyric acid
  SITE 6: note = (S)-2-amino-3-(2-fluorophenyl)-2-methylpropanoic acid
  SITE 10: note = 3-(4-pyridyl)-L-alanine
  SITE 11: note = 2-aminoisobutyric acid
  SITE 13: note = Alpha-methyl-L-leucine
  SITE 16: note = Ornithine
  SITE 17: note = Lysine is chemically modified through conjugation of the side chain with (2-[2-(2-amino-ethoxy)-ethoxy]-acetyl)2-Gamma-Glutamic acid-CO-(CH2)16-CO2H
  SITE 20: note = 2-aminoisobutyric acid
  SITE 25: note = Alpha-methyl-L-tyrosine
  SITE 40: note = Lysine amide is chemically modified through conjugation of the side chain with (2-[2-(2-amino-ethoxy)-ethoxy]-acetyl)6-GPAPAPAPA-(6S,16S)- 6,16-bis(aminomethyl)-4,7,15,18-tetraoxo-11-(4-oxobutanoyl) -5,8,11,14,17-pentaazahenicosanedioic acid (BEA-MalDap2) which is attached to two Fc sequences

SEQ ID NO: 614 - protein, 40 aa, synthetic construct; identical to SEQ ID NO: 591
  SITE 2: note = 2-aminoisobutyric acid
  SITE 6: note = (S)-2-amino-3-(2-fluorophenyl)-2-methylpropanoic acid
  SITE 10: note = 3-(4-pyridyl)-L-alanine
  SITE 11: note = 2-aminoisobutyric acid
  SITE 13: note = Alpha-methyl-L-leucine
  SITE 16: note = Ornithine
  SITE 17: note = Lysine is chemically modified through conjugation of the side chain with (2-[2-(2-amino-ethoxy)-ethoxy]-acetyl)2-Gamma-Glutamic acid-CO-(CH2)16-CO2H
  SITE 20: note = 2-aminoisobutyric acid
  SITE 25: note = Alpha-methyl-L-tyrosine
  SITE 40: note = Lysine amide is chemically modified through conjugation of the side chain with (2-[2-(2-amino-ethoxy)-ethoxy]-acetyl)6-GPAPA-(6S,16S)-6,16 -bis(aminomethyl)-4,7,15,18-tetraoxo-11-(4-oxobutanoyl)-5,8 ,11,14,17-pentaazahenicosanedioic acid (BEA-MalDap2) which is attached to two Fc sequences

SEQ ID NO: 615 - protein, 40 aa, synthetic construct; identical to SEQ ID NO: 460
  SITE 2: note = 2-aminoisobutyric acid
  SITE 6: note = (S)-2-amino-3-(2-fluorophenyl)-2-methylpropanoic acid
  SITE 10: note = 3-(4-pyridyl)-L-alanine
  SITE 13: note = Alpha-methyl-L-leucine
  SITE 16: note = Ornithine
  SITE 17: note = Lysine is chemically modified through conjugation of the side chain with (2-[2-(2-amino-ethoxy)-ethoxy]-acetyl)2-Gamma-Glutamic acid-CO-(CH2)16-CO2H
  SITE 20: note = 2-aminoisobutyric acid
  SITE 25: note = Alpha-methyl-L-tyrosine
  SITE 40: note = Lysine amide is chemically modified through conjugation of the side chain with (2-[2-(2-amino-ethoxy)-ethoxy]-acetyl)6-GPAPAPAPAPAPA-(6S,1 6S)-6,16-bis(aminomethyl)-4,7,15,18-tetraoxo-11-(4-oxobutan oyl)-5,8,11,14,17-pentaazahenicosanedioic acid (BEA-MalDap2) which is attached to two Fc sequences

SEQ ID NO: 616 - protein, 40 aa, synthetic construct; identical to SEQ ID NO: 460
  SITE 2: note = 2-aminoisobutyric acid
  SITE 6: note = (S)-2-amino-3-(2-fluorophenyl)-2-methylpropanoic acid
  SITE 10: note = 3-(4-pyridyl)-L-alanine
  SITE 13: note = Alpha-methyl-L-leucine
  SITE 16: note = Ornithine
  SITE 17: note = Lysine is chemically modified through conjugation of the side chain with epsilon-Lysine-epsilon-Lysine-Gamma-Glutamic acid-CO-(CH2)16-CO2H
  SITE 20: note = 2-aminoisobutyric acid
  SITE 25: note = Alpha-methyl-L-tyrosine
  SITE 40: note = Lysine amide is chemically modified through conjugation of the side chain with (2-[2-(2-amino-ethoxy)-ethoxy]-acetyl)6-GPAPAPAPAPAPA-(6S,1 6S)-6,16-bis(aminomethyl)-4,7,15,18-tetraoxo-11-(4-oxobutan oyl)-5,8,11,14,17-pentaazahenicosanedioic acid (BEA-MalDap2) which is attached to two Fc sequences

SEQ ID NO: 617 - protein, 40 aa, synthetic construct; identical to SEQ ID NO: 460
  SITE 2: note = 2-aminoisobutyric acid
  SITE 6: note = (S)-2-amino-3-(2-fluorophenyl)-2-methylpropanoic acid
  SITE 10: note = 3-(4-pyridyl)-L-alanine
  SITE 13: note = Alpha-methyl-L-leucine
  SITE 16: note = Ornithine
  SITE 17: note = Lysine is chemically modified through conjugation of the side chain with epsilon-Lysine-epsilon-Lysine-Gamma-Glutamic acid-CO-(CH2)16-CO2H
  SITE 20: note = 2-aminoisobutyric acid
  SITE 24: note = D-Glutamic acid
  SITE 25: note = Alpha-methyl-L-tyrosine
  SITE 40: note = Lysine amide is chemically modified through conjugation of the side chain with (2-[2-(2-amino-ethoxy)-ethoxy]-acetyl)6-GPAPAPAPAPAPA-(6S,1 6S)-6,16-bis(aminomethyl)-4,7,15,18-tetraoxo-11-(4-oxobutan oyl)-5,8,11,14,17-pentaazahenicosanedioic acid (BEA-MalDap2) which is attached to two Fc sequences

SEQ ID NO: 618 - protein, 40 aa, synthetic construct; identical to SEQ ID NO: 591
  SITE 2: note = 2-aminoisobutyric acid
  SITE 6: note = (S)-2-amino-3-(2-fluorophenyl)-2-methylpropanoic acid
  SITE 10: note = 3-(4-pyridyl)-L-alanine
  SITE 11: note = 2-aminoisobutyric acid
  SITE 13: note = Alpha-methyl-L-leucine
  SITE 16: note = Ornithine
  SITE 17: note = Lysine is chemically modified through conjugation of the side chain with (2-[2-(2-amino-ethoxy)-ethoxy]-acetyl)2-Gamma-Glutamic acid-CO-(CH2)16-CO2H
  SITE 20: note = 2-aminoisobutyric acid
  SITE 25: note = Alpha-methyl-L-tyrosine
  SITE 40: note = Lysine amide is chemically modified through conjugation of the side chain with (2-[2-(2-amino-ethoxy)-ethoxy]-acetyl)4-(6S,16S)-6,16-bis(a minomethyl)-4,7,15,18-tetraoxo-11-(4-oxobutanoyl)-5,8,11,14 ,17-pentaazahenicosanedioic acid (BEA-MalDap2) which is attached to two Fc sequences

SEQ ID NO: 619 - protein, 40 aa, synthetic construct; identical to SEQ ID NO: 591
  SITE 2: note = 2-aminoisobutyric acid
  SITE 6: note = (S)-2-amino-3-(2-fluorophenyl)-2-methylpropanoic acid
  SITE 10: note = 3-(4-pyridyl)-L-alanine
  SITE 11: note = 2-aminoisobutyric acid
  SITE 13: note = Alpha-methyl-L-leucine
  SITE 16: note = Ornithine
  SITE 17: note = Lysine is chemically modified through conjugation of the side chain with (2-[2-(2-amino-ethoxy)-ethoxy]-acetyl)2-Gamma-Glutamic acid-CO-(CH2)16-CO2H
  SITE 20: note = 2-aminoisobutyric acid
  SITE 25: note = Alpha-methyl-L-tyrosine
  SITE 40: note = Lysine amide is chemically modified through conjugation of the side chain with (2-[2-(2-amino-ethoxy)-ethoxy]-acetyl)6-(6S,16S)-6,16-bis(a minomethyl)-4,7,15,18-tetraoxo-11-(4-oxobutanoyl)-5,8,11,14 ,17-pentaazahenicosanedioic acid (BEA-MalDap2) which is attached to two Fc sequences

SEQ ID NO: 620 - protein, 40 aa, synthetic construct; identical to SEQ ID NO: 591
  SITE 2: note = 2-aminoisobutyric acid
  SITE 6: note = (S)-2-amino-3-(2-fluorophenyl)-2-methylpropanoic acid
  SITE 10: note = 3-(4-pyridyl)-L-alanine
  SITE 11: note = 2-aminoisobutyric acid
  SITE 13: note = Alpha-methyl-L-leucine
  SITE 16: note = Ornithine
  SITE 17: note = Lysine is chemically modified through conjugation of the side chain with (2-[2-(2-amino-ethoxy)-ethoxy]-acetyl)2-Gamma-Glutamic acid-CO-(CH2)16-CO2H
  SITE 20: note = 2-aminoisobutyric acid
  SITE 25: note = Alpha-methyl-L-tyrosine
  SITE 40: note = Lysine amide is chemically modified through conjugation of the side chain with (2-[2-(2-amino-ethoxy)-ethoxy]-acetyl)4-(6S,16S)-6,16-bis(a minomethyl)-4,7,15,18-tetraoxo-11-(4-oxobutanoyl)-5,8,11,14 ,17-pentaazahenicosanedioic acid (BEA-MalDap2) which is attached to two Fc sequences

SEQ ID NO: 621 - protein, 40 aa, synthetic construct
  SITE 2: note = 2-aminoisobutyric acid
  SITE 6: note = (S)-2-amino-3-(2-fluorophenyl)-2-methylpropanoic acid
  SITE 10: note = 3-(4-pyridyl)-L-alanine
  SITE 11: note = 2-aminoisobutyric acid
  SITE 13: note = Alpha-methyl-L-leucine
  SITE 16: note = Ornithine
  SITE 17: note = Lysine is chemically modified through conjugation of the side chain with (2-[2-(2-amino-ethoxy)-ethoxy]-acetyl)2-Gamma-Glutamic acid-CO-(CH2)16-CO2H
  SITE 20: note = 2-aminoisobutyric acid
  SITE 25: note = Alpha-methyl-L-tyrosine
  SITE 29: note = 2-aminoisobutyric acid
  SITE 40: note = Lysine amide is chemically modified through conjugation of the side chain with 24x Polyethylene glycol-(6S,16S)-6,16-bis(aminomethyl)-4,7,15,18-tetraoxo-11 -(4-oxobutanoyl)-5,8,11,14,17-pentaazahenicosanedioic acid (BEA-MalDap2) which is attached to two Fc sequences
YXEGTXTSDXXIXLDXKAQXEFIEXLIEXSPSSGAPPPSK

SEQ ID NO: 622 - protein, 40 aa, synthetic construct; identical to SEQ ID NO: 621
  SITE 2: note = 2-aminoisobutyric acid
  SITE 6: note = (S)-2-amino-3-(2-fluorophenyl)-2-methylpropanoic acid
  SITE 10: note = 3-(4-pyridyl)-L-alanine
  SITE 11: note = 2-aminoisobutyric acid
  SITE 13: note = Alpha-methyl-L-leucine
  SITE 16: note = Ornithine
  SITE 17: note = Lysine is chemically modified through conjugation of the side chain with epsilon-Lysine-epsilon-Lysine-Gamma-Glutamic acid-CO-(CH2)16-CO2H
  SITE 20: note = 2-aminoisobutyric acid
  SITE 25: note = Alpha-methyl-L-tyrosine
  SITE 29: note = 2-aminoisobutyric acid
  SITE 40: note = Lysine amide is chemically modified through conjugation of the side chain with 24x Polyethylene glycol-(6S,16S)-6,16-bis(aminomethyl)-4,7,15,18-tetraoxo-11 -(4-oxobutanoyl)-5,8,11,14,17-pentaazahenicosanedioic acid (BEA-MalDap2) which is attached to two Fc sequences

SEQ ID NO: 623 - protein, 40 aa, synthetic construct; identical to SEQ ID NO: 621
  SITE 2: note = 2-aminoisobutyric acid
  SITE 6: note = (S)-2-amino-3-(2-fluorophenyl)-2-methylpropanoic acid
  SITE 10: note = 3-(4-pyridyl)-L-alanine
  SITE 11: note = 2-aminoisobutyric acid
  SITE 13: note = Alpha-methyl-L-leucine
  SITE 16: note = Ornithine
  SITE 17: note = Lysine is chemically modified through conjugation of the side chain with epsilon-Lysine-epsilon-Lysine-Gamma-Glutamic acid-CO-(CH2)16-CO2H
  SITE 20: note = 2-aminoisobutyric acid
  SITE 24: note = D-Glutamic acid
  SITE 25: note = Alpha-methyl-L-tyrosine
  SITE 29: note = 2-aminoisobutyric acid
  SITE 40: note = Lysine amide is chemically modified through conjugation of the side chain with 24x Polyethylene glycol-(6S,16S)-6,16-bis(aminomethyl)-4,7,15,18-tetraoxo-11 -(4-oxobutanoyl)-5,8,11,14,17-pentaazahenicosanedioic acid (BEA-MalDap2) which is attached to two Fc sequences

SEQ ID NO: 624 - protein, 40 aa, synthetic construct; identical to SEQ ID NO: 460
  SITE 2: note = 2-aminoisobutyric acid
  SITE 6: note = (S)-2-amino-3-(2-fluorophenyl)-2-methylpropanoic acid
  SITE 10: note = 3-(4-pyridyl)-L-alanine
  SITE 13: note = Alpha-methyl-L-leucine
  SITE 16: note = Ornithine
  SITE 17: note = Lysine is chemically modified through conjugation of the side chain with (2-[2-(2-amino-ethoxy)-ethoxy]-acetyl)2-Gamma-Glutamic acid-CO-(CH2)16-CO2H
  SITE 20: note = 2-aminoisobutyric acid
  SITE 25: note = Alpha-methyl-L-tyrosine
  SITE 40: note = Lysine amide is chemically modified through conjugation of the side chain with 24x Polyethylene glycol-(6S,16S)-6,16-bis(aminomethyl)-4,7,15,18-tetraoxo-11 -(4-oxobutanoyl)-5,8,11,14,17-pentaazahenicosanedioic acid (BEA-MalDap2) which is attached to two Fc sequences

SEQ ID NO: 625 - protein, 40 aa, synthetic construct
  SITE 2: note = 2-aminoisobutyric acid
  SITE 6: note = (S)-2-amino-3-(2-fluorophenyl)-2-methylpropanoic acid
  SITE 10: note = 3-(4-pyridyl)-L-alanine
  SITE 13: note = Alpha-methyl-L-leucine
  SITE 16: note = Ornithine
  SITE 17: note = Lysine is chemically modified through conjugation of the side chain with (2-[2-(2-amino-ethoxy)-ethoxy]-acetyl)2-Gamma-Glutamic acid-CO-(CH2)16-CO2H
  SITE 20: note = 2-aminoisobutyric acid
  SITE 25: note = Alpha-methyl-L-tyrosine
  SITE 40: note = Lysine amide is chemically modified through conjugation of the side chain with 24x Polyethylene glycol-(6S,16S)-6,16-bis(aminomethyl)-4,7,15,18-tetraoxo-11 -(4-oxobutanoyl)-5,8,11,14,17-pentaazahenicosanedioic acid (BEA-MalDap2) which is attached to two Fc sequences
YXEGTXTSDXSIXLDXKAQXEFIQXLIEGSPSSGAPPPSK

SEQ ID NO: 626 - protein, 40 aa, synthetic construct; identical to SEQ ID NO: 460
  SITE 2: note = 2-aminoisobutyric acid
  SITE 6: note = (S)-2-amino-3-(2-fluorophenyl)-2-methylpropanoic acid
  SITE 10: note = 3-(4-pyridyl)-L-alanine
  SITE 13: note = Alpha-methyl-L-leucine
  SITE 16: note = Ornithine
  SITE 17: note = Lysine is chemically modified through conjugation of the side chain with epsilon-Lysine-epsilon-Lysine-Gamma-Glutamic acid-CO-(CH2)16-CO2H
  SITE 20: note = 2-aminoisobutyric acid
  SITE 25: note = Alpha-methyl-L-tyrosine
  SITE 40: note = Lysine amide is chemically modified through conjugation of the side chain with 24x Polyethylene glycol-(6S,16S)-6,16-bis(aminomethyl)-4,7,15,18-tetraoxo-11 -(4-oxobutanoyl)-5,8,11,14,17-pentaazahenicosanedioic acid (BEA-MalDap2) which is attached to two Fc sequences

SEQ ID NO: 627 - protein, 40 aa, synthetic construct; identical to SEQ ID NO: 625
  SITE 2: note = 2-aminoisobutyric acid
  SITE 6: note = (S)-2-amino-3-(2-fluorophenyl)-2-methylpropanoic acid
  SITE 10: note = 3-(4-pyridyl)-L-alanine
  SITE 13: note = Alpha-methyl-L-leucine
  SITE 16: note = Ornithine
  SITE 17: note = Lysine is chemically modified through conjugation of the side chain with epsilon-Lysine-epsilon-Lysine-Gamma-Glutamic acid-CO-(CH2)16-CO2H
  SITE 20: note = 2-aminoisobutyric acid
  SITE 25: note = Alpha-methyl-L-tyrosine
  SITE 40: note = Lysine amide is chemically modified through conjugation of the side chain with 24x Polyethylene glycol-(6S,16S)-6,16-bis(aminomethyl)-4,7,15,18-tetraoxo-11 -(4-oxobutanoyl)-5,8,11,14,17-pentaazahenicosanedioic acid (BEA-MalDap2) which is attached to two Fc sequences

SEQ ID NO: 628 - protein, 40 aa, synthetic construct
  SITE 2: note = 2-aminoisobutyric acid
  SITE 6: note = (S)-2-amino-3-(2-fluorophenyl)-2-methylpropanoic acid
  SITE 11: note = 2-aminoisobutyric acid
  SITE 13: note = Alpha-methyl-L-leucine
  SITE 16: note = Ornithine
  SITE 17: note = Lysine is chemically modified through conjugation of the side chain with (2-[2-(2-amino-ethoxy)-ethoxy]-acetyl)2-Gamma-Glutamic acid-CO-(CH2)16-CO2H
  SITE 20: note = 2-aminoisobutyric acid
  SITE 25: note = Alpha-methyl-L-tyrosine
  SITE 40: note = Lysine amide is chemically modified through conjugation of the side chain with 24x Polyethylene glycol-(6S,16S)-6,16-bis(aminomethyl)-4,7,15,18-tetraoxo-11 -(4-oxobutanoyl)-5,8,11,14,17-pentaazahenicosanedioic acid (BEA-MalDap2) which is attached to two Fc sequences
YXEGTXTSDYXIXLDXKAQXEFIEXLIEGSPSSGAPPPSK

SEQ ID NO: 629 - protein, 40 aa, synthetic construct
  SITE 2: note = 2-aminoisobutyric acid
  SITE 6: note = (S)-2-amino-3-(2-fluorophenyl)-2-methylpropanoic acid
  SITE 11: note = 2-aminoisobutyric acid
  SITE 13: note = Alpha-methyl-L-leucine
  SITE 16: note = Ornithine
  SITE 17: note = Lysine is chemically modified through conjugation of the side chain with (2-[2-(2-amino-ethoxy)-ethoxy]-acetyl)2-Gamma-Glutamic acid-CO-(CH2)16-CO2H
  SITE 20: note = 2-aminoisobutyric acid
  SITE 25: note = Alpha-methyl-L-tyrosine
  SITE 40: note = Lysine amide is chemically modified through conjugation of the side chain with 24x Polyethylene glycol-(6S,16S)-6,16-bis(aminomethyl)-4,7,15,18-tetraoxo-11 -(4-oxobutanoyl)-5,8,11,14,17-pentaazahenicosanedioic acid (BEA-MalDap2) which is attached to two Fc sequences
YXEGTXTSDYXIXLDXKAQXEFIQXLIEGSPSSGAPPPSK

SEQ ID NO: 630 - protein, 40 aa, synthetic construct; identical to SEQ ID NO: 628
  SITE 2: note = 2-aminoisobutyric acid
  SITE 6: note = (S)-2-amino-3-(2-fluorophenyl)-2-methylpropanoic acid
  SITE 11: note = 2-aminoisobutyric acid
  SITE 13: note = Alpha-methyl-L-leucine
  SITE 16: note = Ornithine
  SITE 17: note = Lysine is chemically modified through conjugation of the side chain with epsilon-Lysine-epsilon-Lysine-Gamma-Glutamic acid-CO-(CH2)16-CO2H
  SITE 20: note = 2-aminoisobutyric acid
  SITE 24: note = D-Glutamic acid
  SITE 25: note = Alpha-methyl-L-tyrosine
  SITE 40: note = Lysine amide is chemically modified through conjugation of the side chain with 24x Polyethylene glycol-(6S,16S)-6,16-bis(aminomethyl)-4,7,15,18-tetraoxo-11 -(4-oxobutanoyl)-5,8,11,14,17-pentaazahenicosanedioic acid (BEA-MalDap2) which is attached to two Fc sequences

SEQ ID NO: 631 - protein, 40 aa, synthetic construct; identical to SEQ ID NO: 628
  SITE 2: note = 2-aminoisobutyric acid
  SITE 6: note = (S)-2-amino-3-(2-fluorophenyl)-2-methylpropanoic acid
  SITE 11: note = 2-aminoisobutyric acid
  SITE 13: note = Alpha-methyl-L-leucine
  SITE 16: note = Ornithine
  SITE 17: note = Lysine is chemically modified through conjugation of the side chain with epsilon-Lysine-epsilon-Lysine-Gamma-Glutamic acid-CO-(CH2)16-CO2H
  SITE 20: note = 2-aminoisobutyric acid
  SITE 25: note = Alpha-methyl-L-tyrosine
  SITE 40: note = Lysine amide is chemically modified through conjugation of the side chain with 24x Polyethylene glycol-(6S,16S)-6,16-bis(aminomethyl)-4,7,15,18-tetraoxo-11 -(4-oxobutanoyl)-5,8,11,14,17-pentaazahenicosanedioic acid (BEA-MalDap2) which is attached to two Fc sequences

SEQ ID NO: 632 - protein, 40 aa, synthetic construct; identical to SEQ ID NO: 629
  SITE 2: note = 2-aminoisobutyric acid
  SITE 6: note = (S)-2-amino-3-(2-fluorophenyl)-2-methylpropanoic acid
  SITE 11: note = 2-aminoisobutyric acid
  SITE 13: note = Alpha-methyl-L-leucine
  SITE 16: note = Ornithine
  SITE 17: note = Lysine is chemically modified through conjugation of the side chain with epsilon-Lysine-epsilon-Lysine-Gamma-Glutamic acid-CO-(CH2)16-CO2H
  SITE 20: note = 2-aminoisobutyric acid
  SITE 25: note = Alpha-methyl-L-tyrosine
  SITE 40: note = Lysine amide is chemically modified through conjugation of the side chain with 24x Polyethylene glycol-(6S,16S)-6,16-bis(aminomethyl)-4,7,15,18-tetraoxo-11 -(4-oxobutanoyl)-5,8,11,14,17-pentaazahenicosanedioic acid (BEA-MalDap2) which is attached to two Fc sequences

SEQ ID NO: 633 - protein, 40 aa, synthetic construct; identical to SEQ ID NO: 591
  SITE 2: note = 2-aminoisobutyric acid
  SITE 6: note = (S)-2-amino-3-(2-fluorophenyl)-2-methylpropanoic acid
  SITE 10: note = 3-(4-pyridyl)-L-alanine
  SITE 11: note = 2-aminoisobutyric acid
  SITE 13: note = Alpha-methyl-L-leucine
  SITE 16: note = Ornithine
  SITE 17: note = Lysine is chemically modified through conjugation of the side chain with epsilon-Lysine-epsilon-Lysine-Gamma-Glutamic acid-CO-(CH2)16-CO2H
  SITE 20: note = Alpha-methyl-L-leucine
  SITE 25: note = Alpha-methyl-L-tyrosine
  SITE 40: note = Lysine amide is chemically modified through conjugation of the side chain with 24x Polyethylene glycol-(6S,16S)-6,16-bis(aminomethyl)-4,7,15,18-tetraoxo-11 -(4-oxobutanoyl)-5,8,11,14,17-pentaazahenicosanedioic acid (BEA-MalDap2) which is attached to two Fc sequences

SEQ ID NO: 634 - protein, 40 aa, synthetic construct; identical to SEQ ID NO: 591
  SITE 2: note = 2-aminoisobutyric acid
  SITE 6: note = (S)-2-amino-3-(2-fluorophenyl)-2-methylpropanoic acid
  SITE 10: note = 3-(4-pyridyl)-L-alanine
  SITE 11: note = 2-aminoisobutyric acid
  SITE 13: note = Alpha-methyl-L-leucine
  SITE 16: note = Ornithine
  SITE 17: note = Lysine is chemically modified through conjugation of the side chain with epsilon-Lysine-epsilon-Lysine-Gamma-Glutamic acid-CO-(CH2)16-CO2H
  SITE 20: note = L-isovaline
  SITE 25: note = Alpha-methyl-L-tyrosine
  SITE 40: note = Lysine amide is chemically modified through conjugation of the side chain with 24x Polyethylene glycol-(6S,16S)-6,16-bis(aminomethyl)-4,7,15,18-tetraoxo-11 -(4-oxobutanoyl)-5,8,11,14,17-pentaazahenicosanedioic acid (BEA-MalDap2) which is attached to two Fc sequences

SEQ ID NO: 635 - protein, 40 aa, synthetic construct; identical to SEQ ID NO: 605
  SITE 2: note = 2-aminoisobutyric acid
  SITE 6: note = (S)-2-amino-3-(2-fluorophenyl)-2-methylpropanoic acid
  SITE 10: note = 3-(4-pyridyl)-L-alanine
  SITE 11: note = 2-aminoisobutyric acid
  SITE 13: note = Alpha-methyl-L-leucine
  SITE 16: note = Ornithine
  SITE 17: note = Lysine is chemically modified through conjugation of the side chain with (2-[2-(2-amino-ethoxy)-ethoxy]-acetyl)2-Gamma-Glutamic acid-CO-(CH2)16-CO2H
  SITE 20: note = Alpha-methyl-L-leucine
  SITE 25: note = Alpha-methyl-L-tyrosine
  SITE 40: note = Lysine amide is chemically modified through conjugation of the side chain with 24x Polyethylene glycol-(6S,16S)-6,16-bis(aminomethyl)-4,7,15,18-tetraoxo-11 -(4-oxobutanoyl)-5,8,11,14,17-pentaazahenicosanedioic acid (BEA-MalDap2) which is attached to two Fc sequences

SEQ ID NO: 636 - protein, 40 aa, synthetic construct; identical to SEQ ID NO: 605
  SITE 2: note = 2-aminoisobutyric acid
  SITE 6: note = (S)-2-amino-3-(2-fluorophenyl)-2-methylpropanoic acid
  SITE 10: note = 3-(4-pyridyl)-L-alanine
  SITE 11: note = 2-aminoisobutyric acid
  SITE 13: note = Alpha-methyl-L-leucine
  SITE 16: note = Ornithine
  SITE 17: note = Lysine is chemically modified through conjugation of the side chain with (2-[2-(2-amino-ethoxy)-ethoxy]-acetyl)2-Gamma-Glutamic acid-CO-(CH2)16-CO2H
  SITE 20: note = L-isovaline
  SITE 25: note = Alpha-methyl-L-tyrosine
  SITE 40: note = Lysine amide is chemically modified through conjugation of the side chain with 24x Polyethylene glycol-(6S,16S)-6,16-bis(aminomethyl)-4,7,15,18-tetraoxo-11 -(4-oxobutanoyl)-5,8,11,14,17-pentaazahenicosanedioic acid (BEA-MalDap2) which is attached to two Fc sequences

SEQ ID NO: 637 - protein, 40 aa, synthetic construct; identical to SEQ ID NO: 605
  SITE 2: note = 2-aminoisobutyric acid
  SITE 6: note = (S)-2-amino-3-(2-fluorophenyl)-2-methylpropanoic acid
  SITE 10: note = 3-(4-pyridyl)-L-alanine
  SITE 11: note = 2-aminoisobutyric acid
  SITE 13: note = Alpha-methyl-L-leucine
  SITE 16: note = Ornithine
  SITE 17: note = Lysine is chemically modified through conjugation of the side chain with epsilon-Lysine-epsilon-Lysine-Gamma-Glutamic acid-CO-(CH2)16-CO2H
  SITE 20: note = Alpha-methyl-L-leucine
  SITE 25: note = Alpha-methyl-L-tyrosine
  SITE 40: note = Lysine amide is chemically modified through conjugation of the side chain with 24x Polyethylene glycol-(6S,16S)-6,16-bis(aminomethyl)-4,7,15,18-tetraoxo-11 -(4-oxobutanoyl)-5,8,11,14,17-pentaazahenicosanedioic acid (BEA-MalDap2) which is attached to two Fc sequences

SEQ ID NO: 638 - protein, 40 aa, synthetic construct; identical to SEQ ID NO: 605
  SITE 2: note = 2-aminoisobutyric acid
  SITE 6: note = (S)-2-amino-3-(2-fluorophenyl)-2-methylpropanoic acid
  SITE 10: note = 3-(4-pyridyl)-L-alanine
  SITE 11: note = 2-aminoisobutyric acid
  SITE 13: note = Alpha-methyl-L-leucine
  SITE 16: note = Ornithine
  SITE 17: note = Lysine is chemically modified through conjugation of the side chain with epsilon-Lysine-epsilon-Lysine-Gamma-Glutamic acid-CO-(CH2)16-CO2H
  SITE 20: note = L-isovaline
  SITE 25: note = Alpha-methyl-L-tyrosine
  SITE 40: note = Lysine amide is chemically modified through conjugation of the side chain with 24x Polyethylene glycol-(6S,16S)-6,16-bis(aminomethyl)-4,7,15,18-tetraoxo-11 -(4-oxobutanoyl)-5,8,11,14,17-pentaazahenicosanedioic acid (BEA-MalDap2) which is attached to two Fc sequences

SEQ ID NO: 639 - protein, 40 aa, synthetic construct
  SITE 2: note = 2-aminoisobutyric acid
  SITE 6: note = (S)-2-amino-3-(2-fluorophenyl)-2-methylpropanoic acid
  SITE 10: note = 3-(4-pyridyl)-L-alanine
  SITE 11: note = 2-aminoisobutyric acid
  SITE 13: note = Alpha-methyl-L-leucine
  SITE 16: note = Ornithine
  SITE 17: note = Lysine is chemically modified through conjugation of the side chain with (2-[2-(2-amino-ethoxy)-ethoxy]-acetyl)2-Gamma-Glutamic acid-CO-(CH2)16-CO2H
  SITE 20: note = 2-aminoisobutyric acid
  SITE 25: note = Alpha-methyl-L-tyrosine
  SITE 40: note = Lysine amide is chemically modified through conjugation of the side chain with 24x Polyethylene glycol-(6S,16S)-6,16-bis(aminomethyl)-4,7,15,18-tetraoxo-11 -(4-oxobutanoyl)-5,8,11,14,17-pentaazahenicosanedioic acid (BEA-MalDap2) which is attached to two Fc sequences
YXEGTXTSDXXIXLDXKAQXQFIEXLIEGSPSSGAPPPSK

SEQ ID NO: 640 - protein, 40 aa, synthetic construct
  SITE 2: note = 2-aminoisobutyric acid
  SITE 6: note = (S)-2-amino-3-(2-fluorophenyl)-2-methylpropanoic acid
  SITE 10: note = 3-(4-pyridyl)-L-alanine
  SITE 11: note = 2-aminoisobutyric acid
  SITE 13: note = Alpha-methyl-L-leucine
  SITE 16: note = Ornithine
  SITE 17: note = Lysine is chemically modified through conjugation of the side chain with epsilon-Lysine-epsilon-Lysine-Gamma-Glutamic acid-CO-(CH2)16-CO2H
  SITE 20: note = 2-aminoisobutyric acid
  SITE 25: note = Alpha-methyl-L-tyrosine
  SITE 40: note = Lysine amide is chemically modified through conjugation of the side chain with 24x Polyethylene glycol-(6S,16S)-6,16-bis(aminomethyl)-4,7,15,18-tetraoxo-11 -(4-oxobutanoyl)-5,8,11,14,17-pentaazahenicosanedioic acid (BEA-MalDap2) which is attached to two Fc sequences
YXEGTXTSDXXIXLDXKAQXEFIQXLLEGSPSSGAPPPSK

SEQ ID NO: 641 - protein, 40 aa, synthetic construct; identical to SEQ ID NO: 625
  SITE 2: note = 2-aminoisobutyric acid
  SITE 6: note = (S)-2-amino-3-(2-fluorophenyl)-2-methylpropanoic acid
  SITE 10: note = 3-(4-pyridyl)-L-alanine
  SITE 13: note = Alpha-methyl-L-leucine
  SITE 16: note = Ornithine
  SITE 17: note = Lysine is chemically modified through conjugation of the side chain with (2-[2-(2-amino-ethoxy)-ethoxy]-acetyl)2-Gamma-Glutamic acid-CO-(CH2)16-CO2H
  SITE 20: note = 2-aminoisobutyric acid
  SITE 25: note = Alpha-methyl-L-tyrosine
  SITE 40: note = Lysine amide is chemically modified through conjugation of the side chain with (2-[2-(2-amino-ethoxy)-ethoxy]-acetyl)6-GPAPAPAPAPAPA-(6S,1 6S)-6,16-bis(aminomethyl)-4,7,15,18-tetraoxo-11-(4-oxobutan oyl)-5,8,11,14,17-pentaazahenicosanedioic acid (BEA-MalDap2) which is attached to two Fc sequences

SEQ ID NO: 642 - protein, 40 aa, synthetic construct; identical to SEQ ID NO: 625
  SITE 2: note = 2-aminoisobutyric acid
  SITE 6: note = (S)-2-amino-3-(2-fluorophenyl)-2-methylpropanoic acid
  SITE 10: note = 3-(4-pyridyl)-L-alanine
  SITE 13: note = Alpha-methyl-L-leucine
  SITE 16: note = Ornithine
  SITE 17: note = Lysine is chemically modified through conjugation of the side chain with (2-[2-(2-amino-ethoxy)-ethoxy]-acetyl)2-Gamma-Glutamic acid-CO-(CH2)16-CO2H
  SITE 20: note = 2-aminoisobutyric acid
  SITE 25: note = Alpha-methyl-L-tyrosine
  SITE 40: note = Lysine amide is chemically modified through conjugation of the side chain with (2-[2-(2-amino-ethoxy)-ethoxy]-acetyl)6-(6S,16S)-6,16-bis(a minomethyl)-4,7,15,18-tetraoxo-11-(4-oxobutanoyl)-5,8,11,14 ,17-pentaazahenicosanedioic acid (BEA-MalDap2) which is attached to two Fc sequences

SEQ ID NO: 643 - protein, 40 aa, synthetic construct; identical to SEQ ID NO: 625
  SITE 2: note = 2-aminoisobutyric acid
  SITE 6: note = (S)-2-amino-3-(2-fluorophenyl)-2-methylpropanoic acid
  SITE 10: note = 3-(4-pyridyl)-L-alanine
  SITE 13: note = Alpha-methyl-L-leucine
  SITE 16: note = Ornithine
  SITE 17: note = Lysine is chemically modified through conjugation of the side chain with epsilon-Lysine-epsilon-Lysine-Gamma-Glutamic acid-CO-(CH2)16-CO2H
  SITE 20: note = 2-aminoisobutyric acid
  SITE 25: note = Alpha-methyl-L-tyrosine
  SITE 40: note = Lysine amide is chemically modified through conjugation of the side chain with (2-[2-(2-amino-ethoxy)-ethoxy]-acetyl)6-(6S,16S)-6,16-bis(a minomethyl)-4,7,15,18-tetraoxo-11-(4-oxobutanoyl)-5,8,11,14 ,17-pentaazahenicosanedioic acid (BEA-MalDap2) which is attached to two Fc sequences

SEQ ID NO: 644 - protein, 55 aa, synthetic construct; identical to SEQ ID NO: 554
  SITE 2: note = 2-aminoisobutyric acid
  SITE 6: note = (S)-2-amino-3-(2-fluorophenyl)-2-methylpropanoic acid
  SITE 10: note = 3-(4-pyridyl)-L-alanine
  SITE 13: note = Alpha-methyl-L-leucine
  SITE 16: note = Ornithine
  SITE 17: note = Lysine is chemically modified through conjugation of the side chain with (2-[2-(2-amino-ethoxy)-ethoxy]-acetyl)2-Gamma-Glutamic acid-CO-(CH2)16-CO2H
  SITE 20: note = 2-aminoisobutyric acid
  SITE 25: note = Alpha-methyl-L-tyrosine
  SITE 55: note = Lysine amide is chemically modified through conjugation of the side chain with (6S,16S)-6,16-bis(aminomethyl)-4,7,15,18-tetraoxo-11-(4-oxo butanoyl)-5,8,11,14,17-pentaazahenicosanedioic acid (BEA-MalDap2) which is attached to two Fc sequences

SEQ ID NO: 645 - protein, 47 aa, synthetic construct
  SITE 2: note = 2-aminoisobutyric acid
  SITE 6: note = (S)-2-amino-3-(2-fluorophenyl)-2-methylpropanoic acid
  SITE 10: note = 3-(4-pyridyl)-L-alanine
  SITE 13: note = Alpha-methyl-L-leucine
  SITE 16: note = Ornithine
  SITE 17: note = Lysine is chemically modified through conjugation of the side chain with (2-[2-(2-amino-ethoxy)-ethoxy]-acetyl)2-Gamma-Glutamic acid-CO-(CH2)16-CO2H
  SITE 20: note = 2-aminoisobutyric acid
  SITE 25: note = Alpha-methyl-L-tyrosine
  SITE 47: note = Lysine amide is chemically modified through conjugation of the side chain with (6S,16S)-6,16-bis(aminomethyl)-4,7,15,18-tetraoxo-11-(4-oxo butanoyl)-5,8,11,14,17-pentaazahenicosanedioic acid (BEA-MalDap2) which is attached to two Fc sequences
YXEGTXTSDXSIXLDXKAQXEFIQXLIEGGGGGGGSGGGGSGGGGSK

SEQ ID NO: 646 - protein, 55 aa, synthetic construct
  SITE 2: note = 2-aminoisobutyric acid
  SITE 6: note = (S)-2-amino-3-(2-fluorophenyl)-2-methylpropanoic acid
  SITE 10: note = 3-(4-pyridyl)-L-alanine
  SITE 13: note = Alpha-methyl-L-leucine
  SITE 16: note = Ornithine
  SITE 17: note = Lysine is chemically modified through conjugation of the side chain with (2-[2-(2-amino-ethoxy)-ethoxy]-acetyl)2-Gamma-Glutamic acid-CO-(CH2)16-CO2H
  SITE 20: note = 2-aminoisobutyric acid
  SITE 25: note = Alpha-methyl-L-tyrosine
  SITE 55: note = Lysine amide is chemically modified through conjugation of the side chain with (6S,16S)-6,16-bis(aminomethyl)-4,7,15,18-tetraoxo-11-(4-oxo butanoyl)-5,8,11,14,17-pentaazahenicosanedioic acid (BEA-MalDap2) which is attached to two Fc sequences
YXEGTXTSDXSIXLDXKAQXEFIQXLIEGGGGGGGSGGGGSGAPAPAPAPAPAPK

SEQ ID NO: 647 - protein, 47 aa, synthetic construct; identical to SEQ ID NO: 504
  SITE 2: note = 2-aminoisobutyric acid
  SITE 6: note = (S)-2-amino-3-(2-fluorophenyl)-2-methylpropanoic acid
  SITE 10: note = 3-(4-pyridyl)-L-alanine
  SITE 13: note = Alpha-methyl-L-leucine
  SITE 16: note = Ornithine
  SITE 17: note = Lysine is chemically modified through conjugation of the side chain with epsilon-Lysine-epsilon-Lysine-Gamma-Glutamic acid-CO-(CH2)16-CO2H
  SITE 20: note = 2-aminoisobutyric acid
  SITE 25: note = Alpha-methyl-L-tyrosine
  SITE 47: note = Lysine amide is chemically modified through conjugation of the side chain with (6S,16S)-6,16-bis(aminomethyl)-4,7,15,18-tetraoxo-11-(4-oxo butanoyl)-5,8,11,14,17-pentaazahenicosanedioic acid (BEA-MalDap2) which is attached to two Fc sequences

SEQ ID NO: 648 - protein, 47 aa, synthetic construct; identical to SEQ ID NO: 645
  SITE 2: note = 2-aminoisobutyric acid
  SITE 6: note = (S)-2-amino-3-(2-fluorophenyl)-2-methylpropanoic acid
  SITE 10: note = 3-(4-pyridyl)-L-alanine
  SITE 13: note = Alpha-methyl-L-leucine
  SITE 16: note = Ornithine
  SITE 17: note = Lysine is chemically modified through conjugation of the side chain with epsilon-Lysine-epsilon-Lysine-Gamma-Glutamic acid-CO-(CH2)16-CO2H
  SITE 20: note = 2-aminoisobutyric acid
  SITE 25: note = Alpha-methyl-L-tyrosine
  SITE 47: note = Lysine amide is chemically modified through conjugation of the side chain with (6S,16S)-6,16-bis(aminomethyl)-4,7,15,18-tetraoxo-11-(4-oxo butanoyl)-5,8,11,14,17-pentaazahenicosanedioic acid (BEA-MalDap2) which is attached to two Fc sequences

SEQ ID NO: 649 - protein, 55 aa, synthetic construct; identical to SEQ ID NO: 646
  SITE 2: note = 2-aminoisobutyric acid
  SITE 6: note = (S)-2-amino-3-(2-fluorophenyl)-2-methylpropanoic acid
  SITE 10: note = 3-(4-pyridyl)-L-alanine
  SITE 13: note = Alpha-methyl-L-leucine
  SITE 16: note = Ornithine
  SITE 17: note = Lysine is chemically modified through conjugation of the side chain with epsilon-Lysine-epsilon-Lysine-Gamma-Glutamic acid-CO-(CH2)16-CO2H
  SITE 20: note = 2-aminoisobutyric acid
  SITE 25: note = Alpha-methyl-L-tyrosine
  SITE 55: note = Lysine amide is chemically modified through conjugation of the side chain with (6S,16S)-6,16-bis(aminomethyl)-4,7,15,18-tetraoxo-11-(4-oxo butanoyl)-5,8,11,14,17-pentaazahenicosanedioic acid (BEA-MalDap2) which is attached to two Fc sequences

SEQ ID NO: 650 - protein, 40 aa, synthetic construct; identical to SEQ ID NO: 605
  SITE 2: note = 2-aminoisobutyric acid
  SITE 6: note = (S)-2-amino-3-(2-fluorophenyl)-2-methylpropanoic acid
  SITE 10: note = 3-(4-pyridyl)-L-alanine
  SITE 11: note = 2-aminoisobutyric acid
  SITE 13: note = Alpha-methyl-L-leucine
  SITE 16: note = Ornithine
  SITE 17: note = Lysine is chemically modified through conjugation of the side chain with (2-[2-(2-amino-ethoxy)-ethoxy]-acetyl)2-Gamma-Glutamic acid-CO-(CH2)16-CO2H
  SITE 20: note = 2-aminoisobutyric acid
  SITE 25: note = Alpha-methyl-L-tyrosine
  SITE 40: note = Lysine amide is chemically modified through conjugation of the side chain with (2-[2-(2-amino-ethoxy)-ethoxy]-acetyl)6-GPAPAPAPAPAPA-(6S,1 6S)-6,16-bis(aminomethyl)-4,7,15,18-tetraoxo-11-(4-oxobutan oyl)-5,8,11,14,17-pentaazahenicosanedioic acid (BEA-MalDap2) which is attached to two Fc sequences

SEQ ID NO: 651 - protein, 40 aa, synthetic construct; identical to SEQ ID NO: 605
  SITE 2: note = 2-aminoisobutyric acid
  SITE 6: note = (S)-2-amino-3-(2-fluorophenyl)-2-methylpropanoic acid
  SITE 10: note = 3-(4-pyridyl)-L-alanine
  SITE 11: note = 2-aminoisobutyric acid
  SITE 13: note = Alpha-methyl-L-leucine
  SITE 16: note = Ornithine
  SITE 17: note = Lysine is chemically modified through conjugation of the side chain with (2-[2-(2-amino-ethoxy)-ethoxy]-acetyl)2-Gamma-Glutamic acid-CO-(CH2)16-CO2H
  SITE 20: note = 2-aminoisobutyric acid
  SITE 25: note = Alpha-methyl-L-tyrosine
  SITE 40: note = Lysine amide is chemically modified through conjugation of the side chain with (2-[2-(2-amino-ethoxy)-ethoxy]-acetyl)6-(6S,16S)-6,16-bis(a minomethyl)-4,7,15,18-tetraoxo-11-(4-oxobutanoyl)-5,8,11,14 ,17-pentaazahenicosanedioic acid (BEA-MalDap2) which is attached to two Fc sequences

SEQ ID NO: 652 - protein, 55 aa, synthetic construct; identical to SEQ ID NO: 555
  SITE 2: note = 2-aminoisobutyric acid
  SITE 6: note = (S)-2-amino-3-(2-fluorophenyl)-2-methylpropanoic acid
  SITE 10: note = 3-(4-pyridyl)-L-alanine
  SITE 11: note = 2-aminoisobutyric acid
  SITE 13: note = Alpha-methyl-L-leucine
  SITE 16: note = Ornithine
  SITE 17: note = Lysine is chemically modified through conjugation of the side chain with (2-[2-(2-amino-ethoxy)-ethoxy]-acetyl)2-Gamma-Glutamic acid-CO-(CH2)16-CO2H
  SITE 20: note = 2-aminoisobutyric acid
  SITE 25: note = Alpha-methyl-L-tyrosine
  SITE 55: note = Lysine amide is chemically modified through conjugation of the side chain with (6S,16S)-6,16-bis(aminomethyl)-4,7,15,18-tetraoxo-11-(4-oxo butanoyl)-5,8,11,14,17-pentaazahenicosanedioic acid (BEA-MalDap2) which is attached to two Fc sequences

SEQ ID NO: 653 - protein, 47 aa, synthetic construct
  SITE 2: note = 2-aminoisobutyric acid
  SITE 6: note = (S)-2-amino-3-(2-fluorophenyl)-2-methylpropanoic acid
  SITE 10: note = 3-(4-pyridyl)-L-alanine
  SITE 11: note = 2-aminoisobutyric acid
  SITE 13: note = Alpha-methyl-L-leucine
  SITE 16: note = Ornithine
  SITE 17: note = Lysine is chemically modified through conjugation of the side chain with (2-[2-(2-amino-ethoxy)-ethoxy]-acetyl)2-Gamma-Glutamic acid-CO-(CH2)16-CO2H
  SITE 20: note = 2-aminoisobutyric acid
  SITE 25: note = Alpha-methyl-L-tyrosine
  SITE 47: note = Lysine amide is chemically modified through conjugation of the side chain with (6S,16S)-6,16-bis(aminomethyl)-4,7,15,18-tetraoxo-11-(4-oxo butanoyl)-5,8,11,14,17-pentaazahenicosanedioic acid (BEA-MalDap2) which is attached to two Fc sequences
YXEGTXTSDXXIXLDXKAQXEFIQXLIEGGGGGGGSGGGGSGGGGSK

SEQ ID NO: 654 - protein, 55 aa, synthetic construct
  SITE 2: note = 2-aminoisobutyric acid
  SITE 6: note = (S)-2-amino-3-(2-fluorophenyl)-2-methylpropanoic acid
  SITE 10: note = 3-(4-pyridyl)-L-alanine
  SITE 11: note = 2-aminoisobutyric acid
  SITE 13: note = Alpha-methyl-L-leucine
  SITE 16: note = Ornithine
  SITE 17: note = Lysine is chemically modified through conjugation of the side chain with (2-[2-(2-amino-ethoxy)-ethoxy]-acetyl)2-Gamma-Glutamic acid-CO-(CH2)16-CO2H
  SITE 20: note = 2-aminoisobutyric acid
  SITE 25: note = Alpha-methyl-L-tyrosine
  SITE 55: note = Lysine amide is chemically modified through conjugation of the side chain with (6S,16S)-6,16-bis(aminomethyl)-4,7,15,18-tetraoxo-11-(4-oxo butanoyl)-5,8,11,14,17-pentaazahenicosanedioic acid (BEA-MalDap2) which is attached to two Fc sequences
YXEGTXTSDXXIXLDXKAQXEFIQXLIEGGGGGGGSGGGGSGAPAPAPAPAPAPK

SEQ ID NO: 655 - protein, 40 aa, synthetic construct
  SITE 2: note = 2-aminoisobutyric acid
  SITE 6: note = (S)-2-amino-3-(2-fluorophenyl)-2-methylpropanoic acid
  SITE 10: note = 3-(4-pyridyl)-L-alanine
  SITE 11: note = 2-aminoisobutyric acid
  SITE 13: note = Alpha-methyl-L-leucine
  SITE 16: note = Ornithine
  SITE 17: note = Lysine is chemically modified through conjugation of the side chain with (2-[2-(2-amino-ethoxy)-ethoxy]-acetyl)2-Gamma-Glutamic acid-CO-(CH2)16-CO2H
  SITE 20: note = 2-aminoisobutyric acid
  SITE 25: note = Alpha-methyl-L-tyrosine
  SITE 40: note = Lysine amide is chemically modified through conjugation of the side chain with (2-[2-(2-amino-ethoxy)-ethoxy]-acetyl)6-(6S,16S)-6,16-bis(a minomethyl)-4,7,15,18-tetraoxo-11-(4-oxobutanoyl)-5,8,11,14 ,17-pentaazahenicosanedioic acid (BEA-MalDap2) which is attached to two Fc sequences
YXEGTXTSDXXIXLDXKAQXDFIQXLIEGSPSSGAPPPSK

SEQ ID NO: 656 - protein, 39 aa, synthetic construct; identical to SEQ ID NO: 71
  SITE 2: note = 2-aminoisobutyric acid
  SITE 6: note = (S)-2-amino-3-(2-fluorophenyl)-2-methylpropanoic acid
  SITE 10: note = 3-(4-pyridyl)-L-alanine
  SITE 13: note = Alpha-methyl-L-leucine
  SITE 16: note = Ornithine
  SITE 17: note = Lysine is chemically modified through conjugation of the side chain with (2-[2-(2-amino-ethoxy)-ethoxy]-acetyl)2-Gamma-Glutamic acid-CO-(CH2)16-CO2H
  SITE 20: note = 2-aminoisobutyric acid
  SITE 24: note = Lysine is chemically modified through conjugation of the side chain with 24x Polyethylene glycol-(6S,16S)-6,16-bis(aminomethyl)-4,7,15,18-tetraoxo-11 -(4-oxobutanoyl)-5,8,11,14,17-pentaazahenicosanedioic acid (BEA-MalDap2) which is attached to two Fc sequences
  SITE 25: note = Alpha-methyl-L-tyrosine
  SITE 39: note = Amidated Serine

SEQ ID NO: 657 - protein, 39 aa, synthetic construct; identical to SEQ ID NO: 72
  SITE 2: note = 2-aminoisobutyric acid
  SITE 6: note = (S)-2-amino-3-(2-fluorophenyl)-2-methylpropanoic acid
  SITE 10: note = 3-(4-pyridyl)-L-alanine
  SITE 11: note = 2-aminoisobutyric acid
  SITE 13: note = Alpha-methyl-L-leucine
  SITE 16: note = Ornithine
  SITE 17: note = Lysine is chemically modified through conjugation of the side chain with (2-[2-(2-amino-ethoxy)-ethoxy]-acetyl)2-Gamma-Glutamic acid-CO-(CH2)16-CO2H
  SITE 20: note = 2-aminoisobutyric acid
  SITE 24: note = Lysine is chemically modified through conjugation of the side chain with 24x Polyethylene glycol-(6S,16S)-6,16-bis(aminomethyl)-4,7,15,18-tetraoxo-11 -(4-oxobutanoyl)-5,8,11,14,17-pentaazahenicosanedioic acid (BEA-MalDap2) which is attached to two Fc sequences
  SITE 25: note = Alpha-methyl-L-tyrosine
  SITE 39: note = Amidated Serine

SEQ ID NO: 658 - protein, 39 aa, synthetic construct; identical to SEQ ID NO: 71
  SITE 2: note = 2-aminoisobutyric acid
  SITE 6: note = (S)-2-amino-3-(2-fluorophenyl)-2-methylpropanoic acid
  SITE 10: note = 3-(4-pyridyl)-L-alanine
  SITE 13: note = Alpha-methyl-L-leucine
  SITE 16: note = Ornithine
  SITE 17: note = Lysine is chemically modified through conjugation of the side chain with (2-[2-(2-amino-ethoxy)-ethoxy]-acetyl)2-Gamma-Glutamic acid-CO-(CH2)16-CO2H
  SITE 20: note = 2-aminoisobutyric acid
  SITE 24: note = Lysine is chemically modified through conjugation of the side chain with (2-[2-(2-amino-ethoxy)-ethoxy]-acetyl)6-(6S,16S)-6,16-bis(a minomethyl)-4,7,15,18-tetraoxo-11-(4-oxobutanoyl)-5,8,11,14 ,17-pentaazahenicosanedioic acid (BEA-MalDap2) which is attached to two Fc sequences
  SITE 25: note = Alpha-methyl-L-tyrosine
  SITE 39: note = Amidated Serine

SEQ ID NO: 659 - protein, 39 aa, synthetic construct; identical to SEQ ID NO: 72
  SITE 2: note = 2-aminoisobutyric acid
  SITE 6: note = (S)-2-amino-3-(2-fluorophenyl)-2-methylpropanoic acid
  SITE 10: note = 3-(4-pyridyl)-L-alanine
  SITE 11: note = 2-aminoisobutyric acid
  SITE 13: note = Alpha-methyl-L-leucine
  SITE 16: note = Ornithine
  SITE 17: note = Lysine is chemically modified through conjugation of the side chain with (2-[2-(2-amino-ethoxy)-ethoxy]-acetyl)2-Gamma-Glutamic acid-CO-(CH2)16-CO2H
  SITE 20: note = 2-aminoisobutyric acid
  SITE 24: note = Lysine is chemically modified through conjugation of the side chain with (2-[2-(2-amino-ethoxy)-ethoxy]-acetyl)6-(6S,16S)-6,16-bis(a minomethyl)-4,7,15,18-tetraoxo-11-(4-oxobutanoyl)-5,8,11,14 ,17-pentaazahenicosanedioic acid (BEA-MalDap2) which is attached to two Fc sequences
  SITE 25: note = Alpha-methyl-L-tyrosine
  SITE 39: note = Amidated Serine

SEQ ID NO: 660 - protein, 40 aa, synthetic construct; identical to SEQ ID NO: 605
  SITE 2: note = 2-aminoisobutyric acid
  SITE 6: note = (S)-2-amino-3-(2-fluorophenyl)-2-methylpropanoic acid
  SITE 10: note = 3-(4-pyridyl)-L-alanine
  SITE 11: note = 2-aminoisobutyric acid
  SITE 13: note = Alpha-methyl-L-leucine
  SITE 16: note = Ornithine
  SITE 17: note = Lysine is chemically modified through conjugation of the side chain with epsilon-Lysine-2-[2-(2-amino-ethoxy)-ethoxy]-acetyl-Gamma-G lutamic acid-CO-(CH2)16-CO2H
  SITE 20: note = 2-aminoisobutyric acid
  SITE 25: note = Alpha-methyl-L-tyrosine
  SITE 40: note = Lysine amide is chemically modified through conjugation of the side chain with (2-[2-(2-amino-ethoxy)-ethoxy]-acetyl)6-(6S,16S)-6,16-bis(a minomethyl)-4,7,15,18-tetraoxo-11-(4-oxobutanoyl)-5,8,11,14 ,17-pentaazahenicosanedioic acid (BEA-MalDap2) which is attached to two Fc sequences

SEQ ID NO: 661 - protein, 40 aa, synthetic construct; identical to SEQ ID NO: 605
  SITE 2: note = 2-aminoisobutyric acid
  SITE 6: note = (S)-2-amino-3-(2-fluorophenyl)-2-methylpropanoic acid
  SITE 10: note = 3-(4-pyridyl)-L-alanine
  SITE 11: note = 2-aminoisobutyric acid
  SITE 13: note = Alpha-methyl-L-leucine
  SITE 16: note = Ornithine
  SITE 17: note = Lysine is chemically modified through conjugation of the side chain with 2-[2-(2-amino-ethoxy)-ethoxy]-acetyl-epsilon-Lysine-Gamma-G lutamic acid-CO-(CH2)16-CO2H
  SITE 20: note = 2-aminoisobutyric acid
  SITE 25: note = Alpha-methyl-L-tyrosine
  SITE 40: note = Lysine amide is chemically modified through conjugation of the side chain with (2-[2-(2-amino-ethoxy)-ethoxy]-acetyl)6-(6S,16S)-6,16-bis(a minomethyl)-4,7,15,18-tetraoxo-11-(4-oxobutanoyl)-5,8,11,14 ,17-pentaazahenicosanedioic acid (BEA-MalDap2) which is attached to two Fc sequences

SEQ ID NO: 662 - protein, 40 aa, synthetic construct; identical to SEQ ID NO: 591
  SITE 2: note = 2-aminoisobutyric acid
  SITE 6: note = (S)-2-amino-3-(2-fluorophenyl)-2-methylpropanoic acid
  SITE 10: note = 3-(4-pyridyl)-L-alanine
  SITE 11: note = 2-aminoisobutyric acid
  SITE 13: note = Alpha-methyl-L-leucine
  SITE 16: note = Ornithine
  SITE 17: note = Lysine is chemically modified through conjugation of the side chain with epsilon-Lysine-epsilon-Lysine-Gamma-Glutamic acid-CO-(CH2)16-CO2H
  SITE 20: note = 2-aminoisobutyric acid
  SITE 25: note = Alpha-methyl-L-tyrosine
  SITE 40: note = Lysine amide is chemically modified through conjugation of the side chain with (2-[2-(2-amino-ethoxy)-ethoxy]-acetyl)6-(6S,16S)-6,16-bis(a minomethyl)-4,7,15,18-tetraoxo-11-(4-oxobutanoyl)-5,8,11,14 ,17-pentaazahenicosanedioic acid (BEA-MalDap2) which is attached to two Fc sequences

SEQ ID NO: 663 - protein, 40 aa, synthetic construct; identical to SEQ ID NO: 460
  SITE 2: note = 2-aminoisobutyric acid
  SITE 6: note = (S)-2-amino-3-(2-fluorophenyl)-2-methylpropanoic acid
  SITE 10: note = 3-(4-pyridyl)-L-alanine
  SITE 13: note = Alpha-methyl-L-leucine
  SITE 16: note = Ornithine
  SITE 17: note = Lysine is chemically modified through conjugation of the side chain with epsilon-Lysine-epsilon-Lysine-Gamma-Glutamic acid-CO-(CH2)16-CO2H
  SITE 20: note = 2-aminoisobutyric acid
  SITE 25: note = Alpha-methyl-L-tyrosine
  SITE 40: note = Lysine amide is chemically modified through conjugation of the side chain with (2-[2-(2-amino-ethoxy)-ethoxy]-acetyl)6-(6S,16S)-6,16-bis(a minomethyl)-4,7,15,18-tetraoxo-11-(4-oxobutanoyl)-5,8,11,14 ,17-pentaazahenicosanedioic acid (BEA-MalDap2) which is attached to two Fc sequences

SEQ ID NO: 664 - protein, 40 aa, synthetic construct; identical to SEQ ID NO: 628
  SITE 2: note = 2-aminoisobutyric acid
  SITE 6: note = (S)-2-amino-3-(2-fluorophenyl)-2-methylpropanoic acid
  SITE 11: note = 2-aminoisobutyric acid
  SITE 13: note = Alpha-methyl-L-leucine
  SITE 16: note = Ornithine
  SITE 17: note = Lysine is chemically modified through conjugation of the side chain with (2-[2-(2-amino-ethoxy)-ethoxy]-acetyl)2-Gamma-Glutamic acid-CO-(CH2)16-CO2H
  SITE 20: note = 2-aminoisobutyric acid
  SITE 25: note = Alpha-methyl-L-tyrosine
  SITE 40: note = Lysine amide is chemically modified through conjugation of the side chain with (2-[2-(2-amino-ethoxy)-ethoxy]-acetyl)6-(6S,16S)-6,16-bis(a minomethyl)-4,7,15,18-tetraoxo-11-(4-oxobutanoyl)-5,8,11,14 ,17-pentaazahenicosanedioic acid (BEA-MalDap2) which is attached to two Fc sequences

SEQ ID NO: 665 - protein, 40 aa, synthetic construct; identical to SEQ ID NO: 629
  SITE 2: note = 2-aminoisobutyric acid
  SITE 6: note = (S)-2-amino-3-(2-fluorophenyl)-2-methylpropanoic acid
  SITE 11: note = 2-aminoisobutyric acid
  SITE 13: note = Alpha-methyl-L-leucine
  SITE 16: note = Ornithine
  SITE 17: note = Lysine is chemically modified through conjugation of the side chain with (2-[2-(2-amino-ethoxy)-ethoxy]-acetyl)2-Gamma-Glutamic acid-CO-(CH2)16-CO2H
  SITE 20: note = 2-aminoisobutyric acid
  SITE 25: note = Alpha-methyl-L-tyrosine
  SITE 40: note = Lysine amide is chemically modified through conjugation of the side chain with (2-[2-(2-amino-ethoxy)-ethoxy]-acetyl)6-(6S,16S)-6,16-bis(a minomethyl)-4,7,15,18-tetraoxo-11-(4-oxobutanoyl)-5,8,11,14 ,17-pentaazahenicosanedioic acid (BEA-MalDap2) which is attached to two Fc sequences

SEQ ID NO: 666 - protein, 40 aa, synthetic construct; identical to SEQ ID NO: 628
  SITE 2: note = 2-aminoisobutyric acid
  SITE 6: note = (S)-2-amino-3-(2-fluorophenyl)-2-methylpropanoic acid
  SITE 11: note = 2-aminoisobutyric acid
  SITE 13: note = Alpha-methyl-L-leucine
  SITE 16: note = Ornithine
  SITE 17: note = Lysine is chemically modified through conjugation of the side chain with epsilon-Lysine-epsilon-Lysine-Gamma-Glutamic acid-CO-(CH2)16-CO2H
  SITE 20: note = 2-aminoisobutyric acid
  SITE 25: note = Alpha-methyl-L-tyrosine
  SITE 40: note = Lysine amide is chemically modified through conjugation of the side chain with (2-[2-(2-amino-ethoxy)-ethoxy]-acetyl)6-(6S,16S)-6,16-bis(a minomethyl)-4,7,15,18-tetraoxo-11-(4-oxobutanoyl)-5,8,11,14 ,17-pentaazahenicosanedioic acid (BEA-MalDap2) which is attached to two Fc sequences

SEQ ID NO: 667 - protein, 40 aa, synthetic construct; identical to SEQ ID NO: 629
  SITE 2: note = 2-aminoisobutyric acid
  SITE 6: note = (S)-2-amino-3-(2-fluorophenyl)-2-methylpropanoic acid
  SITE 11: note = 2-aminoisobutyric acid
  SITE 13: note = Alpha-methyl-L-leucine
  SITE 16: note = Ornithine
  SITE 17: note = Lysine is chemically modified through conjugation of the side chain with epsilon-Lysine-epsilon-Lysine-Gamma-Glutamic acid-CO-(CH2)16-CO2H
  SITE 20: note = 2-aminoisobutyric acid
  SITE 25: note = Alpha-methyl-L-tyrosine
  SITE 40: note = Lysine amide is chemically modified through conjugation of the side chain with (2-[2-(2-amino-ethoxy)-ethoxy]-acetyl)6-(6S,16S)-6,16-bis(a minomethyl)-4,7,15,18-tetraoxo-11-(4-oxobutanoyl)-5,8,11,14 ,17-pentaazahenicosanedioic acid (BEA-MalDap2) which is attached to two Fc sequences

SEQ ID NO: 668 - protein, 40 aa, synthetic construct
  SITE 2: note = 2-aminoisobutyric acid
  SITE 6: note = (S)-2-amino-3-(2-fluorophenyl)-2-methylpropanoic acid
  SITE 13: note = Alpha-methyl-L-leucine
  SITE 16: note = Ornithine
  SITE 17: note = Lysine is chemically modified through conjugation of the side chain with (2-[2-(2-amino-ethoxy)-ethoxy]-acetyl)2-Gamma-Glutamic acid-CO-(CH2)16-CO2H
  SITE 20: note = 2-aminoisobutyric acid
  SITE 25: note = Alpha-methyl-L-tyrosine
  SITE 40: note = Lysine amide is chemically modified through conjugation of the side chain with (2-[2-(2-amino-ethoxy)-ethoxy]-acetyl)6-(6S,16S)-6,16-bis(a minomethyl)-4,7,15,18-tetraoxo-11-(4-oxobutanoyl)-5,8,11,14 ,17-pentaazahenicosanedioic acid (BEA-MalDap2) which is attached to two Fc sequences
YXEGTXTSDYSIXLDXKAQXEFIEXLIEGSPSSGAPPPSK

SEQ ID NO: 669 - protein, 40 aa, synthetic construct
  SITE 2: note = 2-aminoisobutyric acid
  SITE 6: note = (S)-2-amino-3-(2-fluorophenyl)-2-methylpropanoic acid
  SITE 13: note = Alpha-methyl-L-leucine
  SITE 16: note = Ornithine
  SITE 17: note = Lysine is chemically modified through conjugation of the side chain with (2-[2-(2-amino-ethoxy)-ethoxy]-acetyl)2-Gamma-Glutamic acid-CO-(CH2)16-CO2H
  SITE 20: note = 2-aminoisobutyric acid
  SITE 25: note = Alpha-methyl-L-tyrosine
  SITE 40: note = Lysine amide is chemically modified through conjugation of the side chain with (2-[2-(2-amino-ethoxy)-ethoxy]-acetyl)6-(6S,16S)-6,16-bis(a minomethyl)-4,7,15,18-tetraoxo-11-(4-oxobutanoyl)-5,8,11,14 ,17-pentaazahenicosanedioic acid (BEA-MalDap2) which is attached to two Fc sequences
YXEGTXTSDYSIXLDXKAQXEFIQXLIEGSPSSGAPPPSK

SEQ ID NO: 670 - protein, 40 aa, synthetic construct; identical to SEQ ID NO: 668
  SITE 2: note = 2-aminoisobutyric acid
  SITE 6: note = (S)-2-amino-3-(2-fluorophenyl)-2-methylpropanoic acid
  SITE 13: note = Alpha-methyl-L-leucine
  SITE 16: note = Ornithine
  SITE 17: note = Lysine is chemically modified through conjugation of the side chain with epsilon-Lysine-epsilon-Lysine-Gamma-Glutamic acid-CO-(CH2)16-CO2H
  SITE 20: note = 2-aminoisobutyric acid
  SITE 25: note = Alpha-methyl-L-tyrosine
  SITE 40: note = Lysine amide is chemically modified through conjugation of the side chain with (2-[2-(2-amino-ethoxy)-ethoxy]-acetyl)6-(6S,16S)-6,16-bis(a minomethyl)-4,7,15,18-tetraoxo-11-(4-oxobutanoyl)-5,8,11,14 ,17-pentaazahenicosanedioic acid (BEA-MalDap2) which is attached to two Fc sequences

SEQ ID NO: 671 - protein, 40 aa, synthetic construct; identical to SEQ ID NO: 669
  SITE 2: note = 2-aminoisobutyric acid
  SITE 6: note = (S)-2-amino-3-(2-fluorophenyl)-2-methylpropanoic acid
  SITE 13: note = Alpha-methyl-L-leucine
  SITE 16: note = Ornithine
  SITE 17: note = Lysine is chemically modified through conjugation of the side chain with epsilon-Lysine-epsilon-Lysine-Gamma-Glutamic acid-CO-(CH2)16-CO2H
  SITE 20: note = 2-aminoisobutyric acid
  SITE 25: note = Alpha-methyl-L-tyrosine
  SITE 40: note = Lysine amide is chemically modified through conjugation of the side chain with (2-[2-(2-amino-ethoxy)-ethoxy]-acetyl)6-(6S,16S)-6,16-bis(a minomethyl)-4,7,15,18-tetraoxo-11-(4-oxobutanoyl)-5,8,11,14 ,17-pentaazahenicosanedioic acid (BEA-MalDap2) which is attached to two Fc sequences

SEQ ID NO: 672 - protein, 47 aa, synthetic construct
  SITE 2: note = 2-aminoisobutyric acid
  SITE 6: note = (S)-2-amino-3-(2-fluorophenyl)-2-methylpropanoic acid
  SITE 10: note = 3-(4-pyridyl)-L-alanine
  SITE 11: note = 2-aminoisobutyric acid
  SITE 13: note = Alpha-methyl-L-leucine
  SITE 16: note = Ornithine
  SITE 17: note = Lysine is chemically modified through conjugation of the side chain with epsilon-Lysine-epsilon-Lysine-Gamma-Glutamic acid-CO-(CH2)16-CO2H
  SITE 20: note = 2-aminoisobutyric acid
  SITE 25: note = Alpha-methyl-L-tyrosine
  SITE 47: note = Lysine amide is chemically modified through conjugation of the side chain with (6S,16S)-6,16-bis(aminomethyl)-4,7,15,18-tetraoxo-11-(4-oxo butanoyl)-5,8,11,14,17-pentaazahenicosanedioic acid (BEA-MalDap2) which is attached to two Fc sequences
YXEGTXTSDXXIXLDXKAQXEFIQXLIEGGGGGGGQGGGGQGGGGQK

SEQ ID NO: 673 - protein, 47 aa, synthetic construct
  SITE 2: note = 2-aminoisobutyric acid
  SITE 6: note = (S)-2-amino-3-(2-fluorophenyl)-2-methylpropanoic acid
  SITE 10: note = 3-(4-pyridyl)-L-alanine
  SITE 13: note = Alpha-methyl-L-leucine
  SITE 16: note = Ornithine
  SITE 17: note = Lysine is chemically modified through conjugation of the side chain with epsilon-Lysine-epsilon-Lysine-Gamma-Glutamic acid-CO-(CH2)16-CO2H
  SITE 20: note = 2-aminoisobutyric acid
  SITE 25: note = Alpha-methyl-L-tyrosine
  SITE 47: note = Lysine amide is chemically modified through conjugation of the side chain with (6S,16S)-6,16-bis(aminomethyl)-4,7,15,18-tetraoxo-11-(4-oxo butanoyl)-5,8,11,14,17-pentaazahenicosanedioic acid (BEA-MalDap2) which is attached to two Fc sequences
YXEGTXTSDXSIXLDXKAQXEFIQXLIEGGGGGGGQGGGGQGGGGQK

SEQ ID NO: 674 - protein, 47 aa, synthetic construct
  SITE 2: note = 2-aminoisobutyric acid
  SITE 6: note = (S)-2-amino-3-(2-fluorophenyl)-2-methylpropanoic acid
  SITE 11: note = 2-aminoisobutyric acid
  SITE 13: note = Alpha-methyl-L-leucine
  SITE 16: note = Ornithine
  SITE 17: note = Lysine is chemically modified through conjugation of the side chain with (2-[2-(2-amino-ethoxy)-ethoxy]-acetyl)2-Gamma-Glutamic acid-CO-(CH2)16-CO2H
  SITE 20: note = 2-aminoisobutyric acid
  SITE 25: note = Alpha-methyl-L-tyrosine
  SITE 47: note = Lysine amide is chemically modified through conjugation of the side chain with (6S,16S)-6,16-bis(aminomethyl)-4,7,15,18-tetraoxo-11-(4-oxo butanoyl)-5,8,11,14,17-pentaazahenicosanedioic acid (BEA-MalDap2) which is attached to two Fc sequences
YXEGTXTSDYXIXLDXKAQXEFIEXLIEGGGGGGGSGGGGSGGGGSK

SEQ ID NO: 675 - protein, 47 aa, synthetic construct
  SITE 2: note = 2-aminoisobutyric acid
  SITE 6: note = (S)-2-amino-3-(2-fluorophenyl)-2-methylpropanoic acid
  SITE 10: note = 3-(4-pyridyl)-L-alanine
  SITE 13: note = Alpha-methyl-L-leucine
  SITE 16: note = Ornithine
  SITE 17: note = Lysine is chemically modified through conjugation of the side chain with (2-[2-(2-amino-ethoxy)-ethoxy]-acetyl)2-Gamma-Glutamic acid-CO-(CH2)16-CO2H
  SITE 20: note = 2-aminoisobutyric acid
  SITE 25: note = Alpha-methyl-L-tyrosine
  SITE 47: note = Lysine amide is chemically modified through conjugation of the side chain with (6S,16S)-6,16-bis(aminomethyl)-4,7,15,18-tetraoxo-11-(4-oxo butanoyl)-5,8,11,14,17-pentaazahenicosanedioic acid (BEA-MalDap2) which is attached to two Fc sequences
HXEGTXTSDXSIXLDXKAQXEFIEXLIEGGGGGGGSGGGGSGGGGSK

SEQ ID NO: 676 - protein, 40 aa, synthetic construct
  SITE 2: note = 2-aminoisobutyric acid
  SITE 6: note = (S)-2-amino-3-(2-fluorophenyl)-2-methylpropanoic acid
  SITE 10: note = 3-(4-pyridyl)-L-alanine
  SITE 13: note = Alpha-methyl-L-leucine
  SITE 16: note = Ornithine
  SITE 17: note = Lysine is chemically modified through conjugation of the side chain with epsilon-Lysine-epsilon-Lysine-Gamma-Glutamic acid-CO-(CH2)16-CO2H
  SITE 20: note = 2-aminoisobutyric acid
  SITE 25: note = Alpha-methyl-L-tyrosine
  SITE 40: note = Lysine amide is chemically modified through conjugation of the side chain with 24x Polyethylene glycol-(6S,16S)-6,16-bis(aminomethyl)-4,7,15,18-tetraoxo-11 -(4-oxobutanoyl)-5,8,11,14,17-pentaazahenicosanedioic acid (BEA-MalDap2) which is attached to two Fc sequences
HXEGTXTSDXSIXLDXKAQXEFIEXLIEGSPSSGAPPPSK

SEQ ID NO: 677 - protein, 47 aa, synthetic construct
  SITE 2: note = 2-aminoisobutyric acid
  SITE 6: note = (S)-2-amino-3-(2-fluorophenyl)-2-methylpropanoic acid
  SITE 10: note = 3-(4-pyridyl)-L-alanine
  SITE 11: note = 2-aminoisobutyric acid
  SITE 13: note = Alpha-methyl-L-leucine
  SITE 16: note = Ornithine
  SITE 17: note = Lysine is chemically modified through conjugation of the side chain with (2-[2-(2-amino-ethoxy)-ethoxy]-acetyl)2-Gamma-Glutamic acid-CO-(CH2)16-CO2H
  SITE 20: note = 2-aminoisobutyric acid
  SITE 25: note = Alpha-methyl-L-tyrosine
  SITE 47: note = Lysine amide is chemically modified through conjugation of the side chain with (6S,16S)-6,16-bis(aminomethyl)-4,7,15,18-tetraoxo-11-(4-oxo butanoyl)-5,8,11,14,17-pentaazahenicosanedioic acid (BEA-MalDap2) which is attached to two Fc sequences
YXEGTXTSDXXIXLDXKAQXEFIEXLIEQGGGGGGSGGGGSGGGGSK

SEQ ID NO: 678 - protein, 40 aa, synthetic construct
  SITE 2: note = 2-aminoisobutyric acid
  SITE 6: note = (S)-2-amino-3-(2-fluorophenyl)-2-methylpropanoic acid
  SITE 10: note = 3-(4-pyridyl)-L-alanine
  SITE 13: note = Alpha-methyl-L-leucine
  SITE 16: note = Ornithine
  SITE 17: note = Lysine is chemically modified through conjugation of the side chain with epsilon-Lysine-epsilon-Lysine-Gamma-Glutamic acid-CO-(CH2)16-CO2H
  SITE 20: note = 2-aminoisobutyric acid
  SITE 24: note = D-Glutamic acid
  SITE 25: note = Alpha-methyl-L-tyrosine
  SITE 40: note = Lysine amide is chemically modified through conjugation of the side chain with 24x Polyethylene glycol-(6S,16S)-6,16-bis(aminomethyl)-4,7,15,18-tetraoxo-11 -(4-oxobutanoyl)-5,8,11,14,17-pentaazahenicosanedioic acid (BEA-MalDap2) which is attached to two Fc sequences
YXEGTXTSDXSIXLDXKAQXEFIEXLIEGGPSSGAPPPSK

SEQ ID NO: 679 - protein, 40 aa, synthetic construct; identical to SEQ ID NO: 594
  SITE 2: note = 2-aminoisobutyric acid
  SITE 6: note = (S)-2-amino-3-(2-fluorophenyl)-2-methylpropanoic acid
  SITE 10: note = 3-(4-pyridyl)-L-alanine
  SITE 11: note = 2-aminoisobutyric acid
  SITE 13: note = Alpha-methyl-L-leucine
  SITE 16: note = Ornithine
  SITE 17: note = Lysine is chemically modified through conjugation of the side chain with epsilon-Lysine-epsilon-Lysine-Gamma-Glutamic acid-CO-(CH2)16-CO2H
  SITE 20: note = 2-aminoisobutyric acid
  SITE 24: note = D-Glutamic acid
  SITE 25: note = Alpha-methyl-L-tyrosine
  SITE 40: note = Lysine amide is chemically modified through conjugation of the side chain with 24x Polyethylene glycol-(6S,16S)-6,16-bis(aminomethyl)-4,7,15,18-tetraoxo-11 -(4-oxobutanoyl)-5,8,11,14,17-pentaazahenicosanedioic acid (BEA-MalDap2) which is attached to two Fc sequences

SEQ ID NO: 680 - protein, 40 aa, synthetic construct
  SITE 2: note = 2-aminoisobutyric acid
  SITE 6: note = (S)-2-amino-3-(2-fluorophenyl)-2-methylpropanoic acid
  SITE 11: note = 2-aminoisobutyric acid
  SITE 13: note = Alpha-methyl-L-leucine
  SITE 16: note = Ornithine
  SITE 17: note = Lysine is chemically modified through conjugation of the side chain with (2-[2-(2-amino-ethoxy)-ethoxy]-acetyl)2-Gamma-Glutamic acid-CO-(CH2)16-CO2H
  SITE 20: note = 2-aminoisobutyric acid
  SITE 24: note = D-Glutamic acid
  SITE 25: note = Alpha-methyl-L-tyrosine
  SITE 40: note = Lysine amide is chemically modified through conjugation of the side chain with 24x Polyethylene glycol-(6S,16S)-6,16-bis(aminomethyl)-4,7,15,18-tetraoxo-11 -(4-oxobutanoyl)-5,8,11,14,17-pentaazahenicosanedioic acid (BEA-MalDap2) which is attached to two Fc sequences
YXEGTXTSDYXIXLDXKAQXEFIEXLIEGGPSSGAPPPSK

SEQ ID NO: 681 - protein, 40 aa, synthetic construct; identical to SEQ ID NO: 680
  SITE 2: note = 2-aminoisobutyric acid
  SITE 6: note = (S)-2-amino-3-(2-fluorophenyl)-2-methylpropanoic acid
  SITE 11: note = 2-aminoisobutyric acid
  SITE 13: note = Alpha-methyl-L-leucine
  SITE 16: note = Ornithine
  SITE 17: note = Lysine is chemically modified through conjugation of the side chain with epsilon-Lysine-epsilon-Lysine-Gamma-Glutamic acid-CO-(CH2)16-CO2H
  SITE 20: note = 2-aminoisobutyric acid
  SITE 24: note = D-Glutamic acid
  SITE 25: note = Alpha-methyl-L-tyrosine
  SITE 40: note = Lysine amide is chemically modified through conjugation of the side chain with 24x Polyethylene glycol-(6S,16S)-6,16-bis(aminomethyl)-4,7,15,18-tetraoxo-11 -(4-oxobutanoyl)-5,8,11,14,17-pentaazahenicosanedioic acid (BEA-MalDap2) which is attached to two Fc sequences

SEQ ID NO: 682 - protein, 40 aa, synthetic construct
  SITE 2: note = 2-aminoisobutyric acid
  SITE 6: note = (S)-2-amino-3-(2-fluorophenyl)-2-methylpropanoic acid
  SITE 10: note = 3-(4-pyridyl)-L-alanine
  SITE 13: note = Alpha-methyl-L-leucine
  SITE 16: note = Ornithine
  SITE 17: note = Lysine is chemically modified through conjugation of the side chain with (2-[2-(2-amino-ethoxy)-ethoxy]-acetyl)2-Gamma-Glutamic acid-CO-(CH2)16-CO2H
  SITE 20: note = 2-aminoisobutyric acid
  SITE 24: note = D-Glutamic acid
  SITE 25: note = Alpha-methyl-L-tyrosine
  SITE 40: note = Lysine amide is chemically modified through conjugation of the side chain with 24x Polyethylene glycol-(6S,16S)-6,16-bis(aminomethyl)-4,7,15,18-tetraoxo-11 -(4-oxobutanoyl)-5,8,11,14,17-pentaazahenicosanedioic acid (BEA-MalDap2) which is attached to two Fc sequences
YXEGTXTSDXSIXLDXKAQXEFIEXLIAGSPSSGAPPPSK

SEQ ID NO: 683 - protein, 40 aa, synthetic construct; identical to SEQ ID NO: 682
  SITE 2: note = 2-aminoisobutyric acid
  SITE 6: note = (S)-2-amino-3-(2-fluorophenyl)-2-methylpropanoic acid
  SITE 10: note = 3-(4-pyridyl)-L-alanine
  SITE 13: note = Alpha-methyl-L-leucine
  SITE 16: note = Ornithine
  SITE 17: note = Lysine is chemically modified through conjugation of the side chain with epsilon-Lysine-epsilon-Lysine-Gamma-Glutamic acid-CO-(CH2)16-CO2H
  SITE 20: note = 2-aminoisobutyric acid
  SITE 24: note = D-Glutamic acid
  SITE 25: note = Alpha-methyl-L-tyrosine
  SITE 40: note = Lysine amide is chemically modified through conjugation of the side chain with 24x Polyethylene glycol-(6S,16S)-6,16-bis(aminomethyl)-4,7,15,18-tetraoxo-11 -(4-oxobutanoyl)-5,8,11,14,17-pentaazahenicosanedioic acid (BEA-MalDap2) which is attached to two Fc sequences

SEQ ID NO: 684 - protein, 40 aa, synthetic construct
  SITE 2: note = 2-aminoisobutyric acid
  SITE 6: note = (S)-2-amino-3-(2-fluorophenyl)-2-methylpropanoic acid
  SITE 10: note = 3-(4-pyridyl)-L-alanine
  SITE 11: note = 2-aminoisobutyric acid
  SITE 13: note = Alpha-methyl-L-leucine
  SITE 16: note = Ornithine
  SITE 17: note = Lysine is chemically modified through conjugation of the side chain with epsilon-Lysine-epsilon-Lysine-Gamma-Glutamic acid-CO-(CH2)16-CO2H
  SITE 20: note = 2-aminoisobutyric acid
  SITE 24: note = D-Glutamic acid
  SITE 25: note = Alpha-methyl-L-tyrosine
  SITE 40: note = Lysine amide is chemically modified through conjugation of the side chain with 24x Polyethylene glycol-(6S,16S)-6,16-bis(aminomethyl)-4,7,15,18-tetraoxo-11 -(4-oxobutanoyl)-5,8,11,14,17-pentaazahenicosanedioic acid (BEA-MalDap2) which is attached to two Fc sequences
YXEGTXTSDXXIXLDXKAQXEFIEXLIAGSPSSGAPPPSK

SEQ ID NO: 685 - protein, 40 aa, synthetic construct
  SITE 2: note = 2-aminoisobutyric acid
  SITE 6: note = (S)-2-amino-3-(2-fluorophenyl)-2-methylpropanoic acid
  SITE 11: note = 2-aminoisobutyric acid
  SITE 13: note = Alpha-methyl-L-leucine
  SITE 16: note = Ornithine
  SITE 17: note = Lysine is chemically modified through conjugation of the side chain with (2-[2-(2-amino-ethoxy)-ethoxy]-acetyl)2-Gamma-Glutamic acid-CO-(CH2)16-CO2H
  SITE 20: note = 2-aminoisobutyric acid
  SITE 24: note = D-Glutamic acid
  SITE 25: note = Alpha-methyl-L-tyrosine
  SITE 40: note = Lysine amide is chemically modified through conjugation of the side chain with 24x Polyethylene glycol-(6S,16S)-6,16-bis(aminomethyl)-4,7,15,18-tetraoxo-11 -(4-oxobutanoyl)-5,8,11,14,17-pentaazahenicosanedioic acid (BEA-MalDap2) which is attached to two Fc sequences
YXEGTXTSDYXIXLDXKAQXEFIEXLIAGSPSSGAPPPSK

SEQ ID NO: 686 - protein, 40 aa, synthetic construct; identical to SEQ ID NO: 685
  SITE 2: note = 2-aminoisobutyric acid
  SITE 6: note = (S)-2-amino-3-(2-fluorophenyl)-2-methylpropanoic acid
  SITE 11: note = 2-aminoisobutyric acid
  SITE 13: note = Alpha-methyl-L-leucine
  SITE 16: note = Ornithine
  SITE 17: note = Lysine is chemically modified through conjugation of the side chain with epsilon-Lysine-epsilon-Lysine-Gamma-Glutamic acid-CO-(CH2)16-CO2H
  SITE 20: note = 2-aminoisobutyric acid
  SITE 24: note = D-Glutamic acid
  SITE 25: note = Alpha-methyl-L-tyrosine
  SITE 40: note = Lysine amide is chemically modified through conjugation of the side chain with 24x Polyethylene glycol-(6S,16S)-6,16-bis(aminomethyl)-4,7,15,18-tetraoxo-11 -(4-oxobutanoyl)-5,8,11,14,17-pentaazahenicosanedioic acid (BEA-MalDap2) which is attached to two Fc sequences

SEQ ID NO: 687 - protein, 40 aa, synthetic construct
  SITE 2: note = 2-aminoisobutyric acid
  SITE 6: note = (S)-2-amino-3-(2-fluorophenyl)-2-methylpropanoic acid
  SITE 10: note = 3-(4-pyridyl)-L-alanine
  SITE 13: note = Alpha-methyl-L-leucine
  SITE 16: note = Ornithine
  SITE 17: note = Lysine is chemically modified through conjugation of the side chain with epsilon-Lysine-epsilon-Lysine-Gamma-Glutamic acid-CO-(CH2)16-CO2H
  SITE 20: note = 2-aminoisobutyric acid
  SITE 24: note = D-Glutamic acid
  SITE 25: note = Alpha-methyl-L-tyrosine
  SITE 40: note = Lysine amide is chemically modified through conjugation of the side chain with 24x Polyethylene glycol-(6S,16S)-6,16-bis(aminomethyl)-4,7,15,18-tetraoxo-11 -(4-oxobutanoyl)-5,8,11,14,17-pentaazahenicosanedioic acid (BEA-MalDap2) which is attached to two Fc sequences
YXEGTXTSDXSIXLDXKAQXEFIEXLIAGGPSSGAPPPSK

SEQ ID NO: 688 - protein, 40 aa, synthetic construct; identical to SEQ ID NO: 687
  SITE 2: note = 2-aminoisobutyric acid
  SITE 6: note = (S)-2-amino-3-(2-fluorophenyl)-2-methylpropanoic acid
  SITE 10: note = 3-(4-pyridyl)-L-alanine
  SITE 13: note = Alpha-methyl-L-leucine
  SITE 16: note = Ornithine
  SITE 17: note = Lysine is chemically modified through conjugation of the side chain with (2-[2-(2-amino-ethoxy)-ethoxy]-acetyl)2-Gamma-Glutamic acid-CO-(CH2)16-CO2H
  SITE 20: note = 2-aminoisobutyric acid
  SITE 24: note = D-Glutamic acid
  SITE 25: note = Alpha-methyl-L-tyrosine
  SITE 40: note = Lysine amide is chemically modified through conjugation of the side chain with 24x Polyethylene glycol-(6S,16S)-6,16-bis(aminomethyl)-4,7,15,18-tetraoxo-11 -(4-oxobutanoyl)-5,8,11,14,17-pentaazahenicosanedioic acid (BEA-MalDap2) which is attached to two Fc sequences

SEQ ID NO: 689 - protein, 40 aa, synthetic construct
  SITE 2: note = 2-aminoisobutyric acid
  SITE 6: note = (S)-2-amino-3-(2-fluorophenyl)-2-methylpropanoic acid
  SITE 11: note = 2-aminoisobutyric acid
  SITE 13: note = Alpha-methyl-L-leucine
  SITE 16: note = Ornithine
  SITE 17: note = Lysine is chemically modified through conjugation of the side chain with epsilon-Lysine-epsilon-Lysine-Gamma-Glutamic acid-CO-(CH2)16-CO2H
  SITE 20: note = 2-aminoisobutyric acid
  SITE 24: note = D-Glutamic acid
  SITE 25: note = Alpha-methyl-L-tyrosine
  SITE 40: note = Lysine amide is chemically modified through conjugation of the side chain with 24x Polyethylene glycol-(6S,16S)-6,16-bis(aminomethyl)-4,7,15,18-tetraoxo-11 -(4-oxobutanoyl)-5,8,11,14,17-pentaazahenicosanedioic acid (BEA-MalDap2) which is attached to two Fc sequences
YXEGTXTSDYXIXLDXKAQXEFIEXLIAGGPSSGAPPPSK

SEQ ID NO: 690 - protein, 40 aa, synthetic construct; identical to SEQ ID NO: 689
  SITE 2: note = 2-aminoisobutyric acid
  SITE 6: note = (S)-2-amino-3-(2-fluorophenyl)-2-methylpropanoic acid
  SITE 11: note = 2-aminoisobutyric acid
  SITE 13: note = Alpha-methyl-L-leucine
  SITE 16: note = Ornithine
  SITE 17: note = Lysine is chemically modified through conjugation of the side chain with (2-[2-(2-amino-ethoxy)-ethoxy]-acetyl)2-Gamma-Glutamic acid-CO-(CH2)16-CO2H
  SITE 20: note = 2-aminoisobutyric acid
  SITE 24: note = D-Glutamic acid
  SITE 25: note = Alpha-methyl-L-tyrosine
  SITE 40: note = Lysine amide is chemically modified through conjugation of the side chain with 24x Polyethylene glycol-(6S,16S)-6,16-bis(aminomethyl)-4,7,15,18-tetraoxo-11 -(4-oxobutanoyl)-5,8,11,14,17-pentaazahenicosanedioic acid (BEA-MalDap2) which is attached to two Fc sequences

SEQ ID NO: 691 - protein, 40 aa, synthetic construct; identical to SEQ ID NO: 460
  SITE 2: note = 2-aminoisobutyric acid
  SITE 6: note = (S)-2-amino-3-(2-fluorophenyl)-2-methylpropanoic acid
  SITE 10: note = 3-(4-pyridyl)-L-alanine
  SITE 13: note = Alpha-methyl-L-leucine
  SITE 16: note = Ornithine
  SITE 17: note = Lysine is chemically modified through conjugation of the side chain with 2-[2-(2-amino-ethoxy)-ethoxy]-acetyl-Gamma-Glutamic acid-CO-(CH2)16-CO2H
  SITE 20: note = 2-aminoisobutyric acid
  SITE 24: note = D-Glutamic acid
  SITE 25: note = Alpha-methyl-L-tyrosine
  SITE 40: note = Lysine amide is chemically modified through conjugation of the side chain with 24x Polyethylene glycol-(6S,16S)-6,16-bis(aminomethyl)-4,7,15,18-tetraoxo-11 -(4-oxobutanoyl)-5,8,11,14,17-pentaazahenicosanedioic acid (BEA-MalDap2) which is attached to two Fc sequences

SEQ ID NO: 692 - protein, 40 aa, synthetic construct; identical to SEQ ID NO: 628
  SITE 2: note = 2-aminoisobutyric acid
  SITE 6: note = (S)-2-amino-3-(2-fluorophenyl)-2-methylpropanoic acid
  SITE 11: note = 2-aminoisobutyric acid
  SITE 13: note = Alpha-methyl-L-leucine
  SITE 16: note = Ornithine
  SITE 17: note = Lysine is chemically modified through conjugation of the side chain with 2-[2-(2-amino-ethoxy)-ethoxy]-acetyl-Gamma-Glutamic acid-CO-(CH2)16-CO2H
  SITE 20: note = 2-aminoisobutyric acid
  SITE 24: note = D-Glutamic acid
  SITE 25: note = Alpha-methyl-L-tyrosine
  SITE 40: note = Lysine amide is chemically modified through conjugation of the side chain with 24x Polyethylene glycol-(6S,16S)-6,16-bis(aminomethyl)-4,7,15,18-tetraoxo-11 -(4-oxobutanoyl)-5,8,11,14,17-pentaazahenicosanedioic acid (BEA-MalDap2) which is attached to two Fc sequences

SEQ ID NO: 693 - protein, 40 aa, synthetic construct
  SITE 2: note = 2-aminoisobutyric acid
  SITE 6: note = (S)-2-amino-3-(2-fluorophenyl)-2-methylpropanoic acid
  SITE 10: note = 3-(4-pyridyl)-L-alanine
  SITE 13: note = Alpha-methyl-L-leucine
  SITE 16: note = Ornithine
  SITE 17: note = Lysine is chemically modified through conjugation of the side chain with epsilon-Lysine-epsilon-Lysine-Gamma-Glutamic acid-CO-(CH2)16-CO2H
  SITE 20: note = 2-aminoisobutyric acid
  SITE 24: note = D-Glutamic acid
  SITE 25: note = Alpha-methyl-L-tyrosine
  SITE 40: note = Lysine amide is chemically modified through conjugation of the side chain with 24x Polyethylene glycol-(6S,16S)-6,16-bis(aminomethyl)-4,7,15,18-tetraoxo-11 -(4-oxobutanoyl)-5,8,11,14,17-pentaazahenicosanedioic acid (BEA-MalDap2) which is attached to two Fc sequences
YXEGTXTSDXSIXLDXKAQXEFIEXLVEGSPSSGAPPPSK

SEQ ID NO: 694 - protein, 40 aa, synthetic construct; identical to SEQ ID NO: 682
  SITE 2: note = 2-aminoisobutyric acid
  SITE 6: note = (S)-2-amino-3-(2-fluorophenyl)-2-methylpropanoic acid
  SITE 10: note = 3-(4-pyridyl)-L-alanine
  SITE 13: note = Alpha-methyl-L-leucine
  SITE 16: note = Ornithine
  SITE 17: note = Lysine is chemically modified through conjugation of the side chain with (2-[2-(2-amino-ethoxy)-ethoxy]-acetyl)2-Gamma-Glutamic acid-CO-(CH2)16-CO2H
  SITE 20: note = 2-aminoisobutyric acid
  SITE 25: note = Alpha-methyl-L-tyrosine
  SITE 40: note = Lysine amide is chemically modified through conjugation of the side chain with 24x Polyethylene glycol-(6S,16S)-6,16-bis(aminomethyl)-4,7,15,18-tetraoxo-11 -(4-oxobutanoyl)-5,8,11,14,17-pentaazahenicosanedioic acid (BEA-MalDap2) which is attached to two Fc sequences

SEQ ID NO: 695 - protein, 40 aa, synthetic construct; identical to SEQ ID NO: 682
  SITE 2: note = 2-aminoisobutyric acid
  SITE 6: note = (S)-2-amino-3-(2-fluorophenyl)-2-methylpropanoic acid
  SITE 10: note = 3-(4-pyridyl)-L-alanine
  SITE 13: note = Alpha-methyl-L-leucine
  SITE 16: note = Ornithine
  SITE 17: note = Lysine is chemically modified through conjugation of the side chain with epsilon-Lysine-epsilon-Lysine-Gamma-Glutamic acid-CO-(CH2)16-CO2H
  SITE 20: note = 2-aminoisobutyric acid
  SITE 25: note = Alpha-methyl-L-tyrosine
  SITE 40: note = Lysine amide is chemically modified through conjugation of the side chain with 24x Polyethylene glycol-(6S,16S)-6,16-bis(aminomethyl)-4,7,15,18-tetraoxo-11 -(4-oxobutanoyl)-5,8,11,14,17-pentaazahenicosanedioic acid (BEA-MalDap2) which is attached to two Fc sequences

SEQ ID NO: 696 - protein, 40 aa, synthetic construct; identical to SEQ ID NO: 685
  SITE 2: note = 2-aminoisobutyric acid
  SITE 6: note = (S)-2-amino-3-(2-fluorophenyl)-2-methylpropanoic acid
  SITE 11: note = 2-aminoisobutyric acid
  SITE 13: note = Alpha-methyl-L-leucine
  SITE 16: note = Ornithine
  SITE 17: note = Lysine is chemically modified through conjugation of the side chain with (2-[2-(2-amino-ethoxy)-ethoxy]-acetyl)2-Gamma-Glutamic acid-CO-(CH2)16-CO2H
  SITE 20: note = 2-aminoisobutyric acid
  SITE 25: note = Alpha-methyl-L-tyrosine
  SITE 40: note = Lysine amide is chemically modified through conjugation of the side chain with 24x Polyethylene glycol-(6S,16S)-6,16-bis(aminomethyl)-4,7,15,18-tetraoxo-11 -(4-oxobutanoyl)-5,8,11,14,17-pentaazahenicosanedioic acid (BEA-MalDap2) which is attached to two Fc sequences

SEQ ID NO: 697 - protein, 40 aa, synthetic construct; identical to SEQ ID NO: 685
  SITE 2: note = 2-aminoisobutyric acid
  SITE 6: note = (S)-2-amino-3-(2-fluorophenyl)-2-methylpropanoic acid
  SITE 11: note = 2-aminoisobutyric acid
  SITE 13: note = Alpha-methyl-L-leucine
  SITE 16: note = Ornithine
  SITE 17: note = Lysine is chemically modified through conjugation of the side chain with epsilon-Lysine-epsilon-Lysine-Gamma-Glutamic acid-CO-(CH2)16-CO2H
  SITE 20: note = 2-aminoisobutyric acid
  SITE 25: note = Alpha-methyl-L-tyrosine
  SITE 40: note = Lysine amide is chemically modified through conjugation of the side chain with 24x Polyethylene glycol-(6S,16S)-6,16-bis(aminomethyl)-4,7,15,18-tetraoxo-11 -(4-oxobutanoyl)-5,8,11,14,17-pentaazahenicosanedioic acid (BEA-MalDap2) which is attached to two Fc sequences

SEQ ID NO: 698 - protein, 40 aa, synthetic construct; identical to SEQ ID NO: 460
  SITE 2: note = 2-aminoisobutyric acid
  SITE 6: note = (S)-2-amino-3-(2-fluorophenyl)-2-methylpropanoic acid
  SITE 10: note = 3-(4-pyridyl)-L-alanine
  SITE 13: note = Alpha-methyl-L-leucine
  SITE 16: note = Ornithine
  SITE 17: note = Lysine is chemically modified through conjugation of the side chain with epsilon-Lysine-epsilon-Lysine-Gamma-Glutamic acid-CO-(CH2)16-CO2H
  SITE 20: note = 2-aminoisobutyric acid
  SITE 24: note = D-Glutamic acid
  SITE 25: note = Alpha-methyl-L-tyrosine
  SITE 40: note = Lysine amide is chemically modified through conjugation of the side chain with 24x Polyethylene glycol-N,N-bis(2-(2-(2-(2-(4-(1H-tetrazol-1-yl)phenoxy)etho xy)ethoxy)acetamido)ethyl)-4-oxobutanamide (BEA-MSPT2) which is attached to two Fc sequences

SEQ ID NO: 699 - protein, 40 aa, synthetic construct; identical to SEQ ID NO: 460
  SITE 2: note = 2-aminoisobutyric acid
  SITE 6: note = (S)-2-amino-3-(2-fluorophenyl)-2-methylpropanoic acid
  SITE 10: note = 3-(4-pyridyl)-L-alanine
  SITE 13: note = Alpha-methyl-L-leucine
  SITE 16: note = Ornithine
  SITE 17: note = Lysine is chemically modified through conjugation of the side chain with epsilon-Lysine-epsilon-Lysine-Gamma-Glutamic acid-CO-(CH2)16-CO2H
  SITE 20: note = 2-aminoisobutyric acid
  SITE 24: note = D-Glutamic acid
  SITE 25: note = Alpha-methyl-L-tyrosine
  SITE 40: note = Lysine amide is chemically modified through conjugation of the side chain with 24x Polyethylene glycol-N,N-bis(2-acetamidoethyl)-4-oxobutanamide (BEA-Acetyl2) which is attached to two Fc sequences

SEQ ID NO: 700 - protein, 40 aa, synthetic construct; identical to SEQ ID NO: 460
  SITE 2: note = 2-aminoisobutyric acid
  SITE 6: note = (S)-2-amino-3-(2-fluorophenyl)-2-methylpropanoic acid
  SITE 10: note = 3-(4-pyridyl)-L-alanine
  SITE 13: note = Alpha-methyl-L-leucine
  SITE 16: note = Ornithine
  SITE 17: note = Lysine is chemically modified through conjugation of the side chain with epsilon-Lysine-epsilon-Lysine-Gamma-Glutamic acid-CO-(CH2)16-CO2H
  SITE 20: note = 2-aminoisobutyric acid
  SITE 24: note = D-Glutamic acid
  SITE 25: note = Alpha-methyl-L-tyrosine
  SITE 40: note = Lysine amide is chemically modified through conjugation of the side chain with 24x Polyethylene glycol-N,N-bis(2-(2-(2-(2-(4-(1,3,4-oxadiazol-2-yl)phenoxy) ethoxy)ethoxy)acetamido)ethyl)-4-oxobutanamide (BEA-OD2) which is attached to two Fc sequences

SEQ ID NO: 701 - protein, 40 aa, synthetic construct; identical to SEQ ID NO: 459
  SITE 2: note = 2-aminoisobutyric acid
  SITE 6: note = (S)-2-amino-3-(2-fluorophenyl)-2-methylpropanoic acid
  SITE 10: note = 3-(4-pyridyl)-L-alanine
  SITE 13: note = Alpha-methyl-L-leucine
  SITE 17: note = Acetylated Lysine
  SITE 20: note = 2-aminoisobutyric acid
  SITE 24: note = D-Glutamic acid
  SITE 25: note = Alpha-methyl-L-tyrosine
  SITE 40: note = Lysine amide is chemically modified through conjugation of the side chain with 24x Polyethylene glycol-(6S,16S)-6,16-bis(aminomethyl)-4,7,15,18-tetraoxo-11 -(4-oxobutanoyl)-5,8,11,14,17-pentaazahenicosanedioic acid (BEA-MalDap2) which is attached to two Fc sequences

SEQ ID NO: 702 - protein, 40 aa, synthetic construct
  SITE 2: note = 2-aminoisobutyric acid
  SITE 6: note = (S)-2-amino-3-(2-fluorophenyl)-2-methylpropanoic acid
  SITE 10: note = 3-(4-pyridyl)-L-alanine
  SITE 13: note = Alpha-methyl-L-leucine
  SITE 20: note = 2-aminoisobutyric acid
  SITE 24: note = D-Glutamic acid
  SITE 25: note = Alpha-methyl-L-tyrosine
  SITE 40: note = Lysine amide is chemically modified through conjugation of the side chain with 24x Polyethylene glycol-(6S,16S)-6,16-bis(aminomethyl)-4,7,15,18-tetraoxo-11 -(4-oxobutanoyl)-5,8,11,14,17-pentaazahenicosanedioic acid (BEA-MalDap2) which is attached to two Fc sequences
YXEGTXTSDXSIXLDEQAQXEFIEXLIEGSPSSGAPPPSK

SEQ ID NO: 703 - protein, 40 aa, synthetic construct; identical to SEQ ID NO: 702
  SITE 2: note = 2-aminoisobutyric acid
  SITE 6: note = (S)-2-amino-3-(2-fluorophenyl)-2-methylpropanoic acid
  SITE 10: note = 3-(4-pyridyl)-L-alanine
  SITE 13: note = Alpha-methyl-L-leucine
  SITE 20: note = 2-aminoisobutyric acid
  SITE 24: note = D-Glutamic acid
  SITE 25: note = Alpha-methyl-L-tyrosine
  SITE 40: note = Lysine amide is chemically modified through conjugation of the side chain with 24x Polyethylene glycol-(6S,16S)-6,16-bis(aminomethyl)-4,7,15,18-tetraoxo-11 -(4-oxobutanoyl)-5,8,11,14,17-pentaazahenicosanedioic acid-IgG4 Fc with charge balancing mutations (Q274K - CH2, E355R - CH3, E419Q- CH3) (BEA-MalDap2-KRQ) which is attached to two Fc sequences

SEQ ID NO: 704 - protein, 40 aa, synthetic construct; identical to SEQ ID NO: 460
  SITE 2: note = 2-aminoisobutyric acid
  SITE 6: note = (S)-2-amino-3-(2-fluorophenyl)-2-methylpropanoic acid
  SITE 10: note = 3-(4-pyridyl)-L-alanine
  SITE 13: note = Alpha-methyl-L-leucine
  SITE 16: note = Ornithine
  SITE 17: note = Lysine is chemically modified through conjugation of the side chain with (2-[2-(2-amino-ethoxy)-ethoxy]-acetyl)2-Gamma-Glutamic acid-CO-(CH2)18-CO2H
  SITE 20: note = 2-aminoisobutyric acid
  SITE 24: note = D-Glutamic acid
  SITE 25: note = Alpha-methyl-L-tyrosine
  SITE 40: note = Lysine amide is chemically modified through conjugation of the side chain with 24x Polyethylene glycol-(6S,16S)-6,16-bis(aminomethyl)-4,7,15,18-tetraoxo-11 -(4-oxobutanoyl)-5,8,11,14,17-pentaazahenicosanedioic acid (BEA-MalDap2) which is attached to two Fc sequences

SEQ ID NO: 705 - protein, 40 aa, synthetic construct; identical to SEQ ID NO: 460
  SITE 2: note = 2-aminoisobutyric acid
  SITE 6: note = (S)-2-amino-3-(2-fluorophenyl)-2-methylpropanoic acid
  SITE 10: note = 3-(4-pyridyl)-L-alanine
  SITE 13: note = Alpha-methyl-L-leucine
  SITE 16: note = Ornithine
  SITE 17: note = Lysine is chemically modified through conjugation of the side chain with (2-[2-(2-amino-ethoxy)-ethoxy]-acetyl)2-Gamma-Glutamic acid-CO-(CH2)14-CO2H
  SITE 20: note = 2-aminoisobutyric acid
  SITE 24: note = D-Glutamic acid
  SITE 25: note = Alpha-methyl-L-tyrosine
  SITE 40: note = Lysine amide is chemically modified through conjugation of the side chain with 24x Polyethylene glycol-(6S,16S)-6,16-bis(aminomethyl)-4,7,15,18-tetraoxo-11 -(4-oxobutanoyl)-5,8,11,14,17-pentaazahenicosanedioic acid (BEA-MalDap2) which is attached to two Fc sequences

SEQ ID NO: 706 - protein, 40 aa, synthetic construct; identical to SEQ ID NO: 459
  SITE 2: note = 2-aminoisobutyric acid
  SITE 6: note = (S)-2-amino-3-(2-fluorophenyl)-2-methylpropanoic acid
  SITE 10: note = 3-(4-pyridyl)-L-alanine
  SITE 13: note = Alpha-methyl-L-leucine
  SITE 17: note = Lysine is chemically modified through conjugation of the side chain with (2-[2-(2-amino-ethoxy)-ethoxy]-acetyl)2-Gamma-Glutamic acid-CO-(CH2)14-CO2H
  SITE 20: note = 2-aminoisobutyric acid
  SITE 24: note = D-Glutamic acid
  SITE 25: note = Alpha-methyl-L-tyrosine
  SITE 40: note = Lysine amide is chemically modified through conjugation of the side chain with 24x Polyethylene glycol-(6S,16S)-6,16-bis(aminomethyl)-4,7,15,18-tetraoxo-11 -(4-oxobutanoyl)-5,8,11,14,17-pentaazahenicosanedioic acid (BEA-MalDap2) which is attached to two Fc sequences

SEQ ID NO: 707 - protein, 40 aa, synthetic construct; identical to SEQ ID NO: 460
  SITE 2: note = 2-aminoisobutyric acid
  SITE 6: note = (S)-2-amino-3-(2-fluorophenyl)-2-methylpropanoic acid
  SITE 10: note = 3-(4-pyridyl)-L-alanine
  SITE 13: note = Alpha-methyl-L-leucine
  SITE 16: note = Ornithine
  SITE 17: note = Lysine is chemically modified through conjugation of the side chain with epsilon-Lysine-epsilon-Lysine-Gamma-Glutamic acid-CO-(CH2)18-CO2H
  SITE 20: note = 2-aminoisobutyric acid
  SITE 24: note = D-Glutamic acid
  SITE 25: note = Alpha-methyl-L-tyrosine
  SITE 40: note = Lysine amide is chemically modified through conjugation of the side chain with 24x Polyethylene glycol-(6S,16S)-6,16-bis(aminomethyl)-4,7,15,18-tetraoxo-11 -(4-oxobutanoyl)-5,8,11,14,17-pentaazahenicosanedioic acid (BEA-MalDap2) which is attached to two Fc sequences

SEQ ID NO: 708 - protein, 40 aa, synthetic construct; identical to SEQ ID NO: 459
  SITE 2: note = 2-aminoisobutyric acid
  SITE 6: note = (S)-2-amino-3-(2-fluorophenyl)-2-methylpropanoic acid
  SITE 10: note = 3-(4-pyridyl)-L-alanine
  SITE 13: note = Alpha-methyl-L-leucine
  SITE 17: note = Lysine is chemically modified through conjugation of the side chain with epsilon-Lysine-epsilon-Lysine-Gamma-Glutamic acid-CO-(CH2)18-CO2H
  SITE 20: note = 2-aminoisobutyric acid
  SITE 24: note = D-Glutamic acid
  SITE 25: note = Alpha-methyl-L-tyrosine
  SITE 40: note = Lysine amide is chemically modified through conjugation of the side chain with 24x Polyethylene glycol-(6S,16S)-6,16-bis(aminomethyl)-4,7,15,18-tetraoxo-11 -(4-oxobutanoyl)-5,8,11,14,17-pentaazahenicosanedioic acid (BEA-MalDap2) which is attached to two Fc sequences

SEQ ID NO: 709 - protein, 47 aa, synthetic construct; identical to SEQ ID NO: 504
  SITE 2: note = 2-aminoisobutyric acid
  SITE 6: note = (S)-2-amino-3-(2-fluorophenyl)-2-methylpropanoic acid
  SITE 10: note = 3-(4-pyridyl)-L-alanine
  SITE 13: note = Alpha-methyl-L-leucine
  SITE 16: note = Ornithine
  SITE 17: note = Lysine is chemically modified through conjugation of the side chain with (2-[2-(2-amino-ethoxy)-ethoxy]-acetyl)2-Gamma-Glutamic acid-CO-(CH2)14-CO2H
  SITE 20: note = 2-aminoisobutyric acid
  SITE 25: note = Alpha-methyl-L-tyrosine
  SITE 47: note = Lysine amide is chemically modified through conjugation of the side chain with (6S,16S)-6,16-bis(aminomethyl)-4,7,15,18-tetraoxo-11-(4-oxo butanoyl)-5,8,11,14,17-pentaazahenicosanedioic acid (BEA-MalDap2) which is attached to two Fc sequences

SEQ ID NO: 710 - protein, 40 aa, synthetic construct; identical to SEQ ID NO: 459
  SITE 2: note = 2-aminoisobutyric acid
  SITE 6: note = (S)-2-amino-3-(2-fluorophenyl)-2-methylpropanoic acid
  SITE 10: note = 3-(4-pyridyl)-L-alanine
  SITE 13: note = Alpha-methyl-L-leucine
  SITE 17: note = Lysine is chemically modified through conjugation of the side chain with Gamma-Glutamic acid-2-[2-(2-amino-ethoxy)-ethoxy]-acetyl-epsilon-Lysine-CO -(CH2)18-CO2H
  SITE 20: note = 2-aminoisobutyric acid
  SITE 24: note = D-Glutamic acid
  SITE 25: note = Alpha-methyl-L-tyrosine
  SITE 40: note = Lysine amide is chemically modified through conjugation of the side chain with 24x Polyethylene glycol-(6S,16S)-6,16-bis(aminomethyl)-4,7,15,18-tetraoxo-11 -(4-oxobutanoyl)-5,8,11,14,17-pentaazahenicosanedioic acid (BEA-MalDap2) which is attached to two Fc sequences

SEQ ID NO: 711 - protein, 47 aa, synthetic construct; identical to SEQ ID NO: 505
  SITE 2: note = 2-aminoisobutyric acid
  SITE 6: note = (S)-2-amino-3-(2-fluorophenyl)-2-methylpropanoic acid
  SITE 10: note = 3-(4-pyridyl)-L-alanine
  SITE 11: note = 2-aminoisobutyric acid
  SITE 13: note = Alpha-methyl-L-leucine
  SITE 16: note = Ornithine
  SITE 17: note = Lysine is chemically modified through conjugation of the side chain with (2-[2-(2-amino-ethoxy)-ethoxy]-acetyl)2-Gamma-Glutamic acid-CO-(CH2)14-CO2H
  SITE 20: note = 2-aminoisobutyric acid
  SITE 25: note = Alpha-methyl-L-tyrosine
  SITE 47: note = Lysine amide is chemically modified through conjugation of the side chain with (6S,16S)-6,16-bis(aminomethyl)-4,7,15,18-tetraoxo-11-(4-oxo butanoyl)-5,8,11,14,17-pentaazahenicosanedioic acid (BEA-MalDap2) which is attached to two Fc sequences

SEQ ID NO: 712 - protein, 35 aa, synthetic construct; identical to SEQ ID NO: 574
  SITE 2: note = 2-aminoisobutyric acid
  SITE 6: note = (S)-2-amino-3-(2-fluorophenyl)-2-methylpropanoic acid
  SITE 10: note = 3-(4-pyridyl)-L-alanine
  SITE 11: note = 2-aminoisobutyric acid
  SITE 13: note = Alpha-methyl-L-leucine
  SITE 16: note = Ornithine
  SITE 17: note = Lysine is chemically modified through conjugation of the side chain with (2-[2-(2-amino-ethoxy)-ethoxy]-acetyl)2-Gamma-Glutamic acid-CO-(CH2)14-CO2H
  SITE 20: note = 2-aminoisobutyric acid
  SITE 25: note = Alpha-methyl-L-tyrosine
  SITE 35: note = Lysine amide is chemically modified through conjugation of the side chain with 24x Polyethylene glycol-(6S,16S)-6,16-bis(aminomethyl)-4,7,15,18-tetraoxo-11 -(4-oxobutanoyl)-5,8,11,14,17-pentaazahenicosanedioic acid (BEA-MalDap2) which is attached to two Fc sequences

SEQ ID NO: 713 - protein, 31 aa, synthetic construct; identical to SEQ ID NO: 22
  SITE 2: note = 2-aminoisobutyric acid
  SITE 6: note = (S)-2-amino-3-(2-fluorophenyl)-2-methylpropanoic acid
  SITE 10: note = 3-(4-pyridyl)-L-alanine
  SITE 11: note = 2-aminoisobutyric acid
  SITE 13: note = Alpha-methyl-L-leucine
  SITE 16: note = Ornithine
  SITE 17: note = Lysine is chemically modified through conjugation of the side chain with (2-[2-(2-amino-ethoxy)-ethoxy]-acetyl)2-Gamma-Glutamic acid-CO-(CH2)14-CO2H
  SITE 20: note = 2-aminoisobutyric acid
  SITE 25: note = Alpha-methyl-L-tyrosine
  SITE 31: note = Residue attached via 24x polyethylene glycol to lysine amide chemically modified through conjugation of the side chain with (6S,16S)-6,16-bis(aminomethyl)-4,7,15,18-tetraoxo-11-(4-oxo butanoyl)-5,8,11,14,17-pentaazahenicosanedioic acid (BEA-MalDap2) which is attached to two Fc sequences

SEQ ID NO: 714 - protein, 32 aa, synthetic construct; identical to SEQ ID NO: 576
  SITE 2: note = 2-aminoisobutyric acid
  SITE 6: note = (S)-2-amino-3-(2-fluorophenyl)-2-methylpropanoic acid
  SITE 10: note = 3-(4-pyridyl)-L-alanine
  SITE 11: note = 2-aminoisobutyric acid
  SITE 13: note = Alpha-methyl-L-leucine
  SITE 16: note = Ornithine
  SITE 17: note = Lysine is chemically modified through conjugation of the side chain with (2-[2-(2-amino-ethoxy)-ethoxy]-acetyl)2-Gamma-Glutamic acid-CO-(CH2)14-CO2H
  SITE 20: note = 2-aminoisobutyric acid
  SITE 25: note = Alpha-methyl-L-tyrosine
  SITE 32: note = Lysine amide is chemically modified through conjugation of the side chain with 24x Polyethylene glycol-(6S,16S)-6,16-bis(aminomethyl)-4,7,15,18-tetraoxo-11 -(4-oxobutanoyl)-5,8,11,14,17-pentaazahenicosanedioic acid (BEA-MalDap2) which is attached to two Fc sequences

SEQ ID NO: 715 - protein, 35 aa, synthetic construct
  SITE 2: note = 2-aminoisobutyric acid
  SITE 6: note = (S)-2-amino-3-(2-fluorophenyl)-2-methylpropanoic acid
  SITE 10: note = 3-(4-pyridyl)-L-alanine
  SITE 11: note = 2-aminoisobutyric acid
  SITE 13: note = Alpha-methyl-L-leucine
  SITE 17: note = Lysine is chemically modified through conjugation of the side chain with epsilon-Lysine-epsilon-Lysine-Gamma-Glutamic acid-CO-(CH2)14-CO2H
  SITE 20: note = 2-aminoisobutyric acid
  SITE 25: note = Alpha-methyl-L-tyrosine
  SITE 35: note = Lysine amide is chemically modified through conjugation of the side chain with 24x Polyethylene glycol-(6S,16S)-6,16-bis(aminomethyl)-4,7,15,18-tetraoxo-11 -(4-oxobutanoyl)-5,8,11,14,17-pentaazahenicosanedioic acid (BEA-MalDap2) which is attached to two Fc sequences
YXEGTXTSDXXIXLDEKAQXEFIEXLIEGGPSSGK

SEQ ID NO: 716 - protein, 31 aa, synthetic construct; identical to SEQ ID NO: 16
  SITE 2: note = 2-aminoisobutyric acid
  SITE 6: note = (S)-2-amino-3-(2-fluorophenyl)-2-methylpropanoic acid
  SITE 10: note = 3-(4-pyridyl)-L-alanine
  SITE 11: note = 2-aminoisobutyric acid
  SITE 13: note = Alpha-methyl-L-leucine
  SITE 17: note = Lysine is chemically modified through conjugation of the side chain with epsilon-Lysine-epsilon-Lysine-Gamma-Glutamic acid-CO-(CH2)14-CO2H
  SITE 20: note = 2-aminoisobutyric acid
  SITE 25: note = Alpha-methyl-L-tyrosine
  SITE 31: note = Residue attached via 24x polyethylene glycol to lysine amide chemically modified through conjugation of the side chain with (6S,16S)-6,16-bis(aminomethyl)-4,7,15,18-tetraoxo-11-(4-oxo butanoyl)-5,8,11,14,17-pentaazahenicosanedioic acid (BEA-MalDap2) which is attached to two Fc sequences

SEQ ID NO: 717 - protein, 32 aa, synthetic construct
  SITE 2: note = 2-aminoisobutyric acid
  SITE 6: note = (S)-2-amino-3-(2-fluorophenyl)-2-methylpropanoic acid
  SITE 10: note = 3-(4-pyridyl)-L-alanine
  SITE 11: note = 2-aminoisobutyric acid
  SITE 13: note = Alpha-methyl-L-leucine
  SITE 17: note = Lysine is chemically modified through conjugation of the side chain with epsilon-Lysine-epsilon-Lysine-Gamma-Glutamic acid-CO-(CH2)14-CO2H
  SITE 20: note = 2-aminoisobutyric acid
  SITE 25: note = Alpha-methyl-L-tyrosine
  SITE 32: note = Lysine amide is chemically modified through conjugation of the side chain with 24x Polyethylene glycol-(6S,16S)-6,16-bis(aminomethyl)-4,7,15,18-tetraoxo-11 -(4-oxobutanoyl)-5,8,11,14,17-pentaazahenicosanedioic acid (BEA-MalDap2) which is attached to two Fc sequences
YXEGTXTSDXXIXLDEKAQXEFIEXLIEGGGK

SEQ ID NO: 718 - protein, 47 aa, synthetic construct; identical to SEQ ID NO: 461
  SITE 2: note = 2-aminoisobutyric acid
  SITE 6: note = (S)-2-amino-3-(2-fluorophenyl)-2-methylpropanoic acid
  SITE 10: note = 3-(4-pyridyl)-L-alanine
  SITE 13: note = Alpha-methyl-L-leucine
  SITE 17: note = Lysine is chemically modified through conjugation of the side chain with (2-[2-(2-amino-ethoxy)-ethoxy]-acetyl)2-Gamma-Glutamic acid-CO-(CH2)14-CO2H
  SITE 20: note = 2-aminoisobutyric acid
  SITE 25: note = Alpha-methyl-L-tyrosine
  SITE 47: note = Lysine amide is chemically modified through conjugation of the side chain with (6S,16S)-6,16-bis(aminomethyl)-4,7,15,18-tetraoxo-11-(4-oxo butanoyl)-5,8,11,14,17-pentaazahenicosanedioic acid (BEA-MalDap2) which is attached to two Fc sequences

SEQ ID NO: 719 - protein, 47 aa, synthetic construct; identical to SEQ ID NO: 461
  SITE 2: note = 2-aminoisobutyric acid
  SITE 6: note = (S)-2-amino-3-(2-fluorophenyl)-2-methylpropanoic acid
  SITE 10: note = 3-(4-pyridyl)-L-alanine
  SITE 13: note = Alpha-methyl-L-leucine
  SITE 17: note = Lysine is chemically modified through conjugation of the side chain with (2-[2-(2-amino-ethoxy)-ethoxy]-acetyl)2-Gamma-Glutamic acid-epsilon-Lysine-epsilon-Lysine-Gamma-Glutamic acid-CO-(CH2)14-CO2H
  SITE 20: note = 2-aminoisobutyric acid
  SITE 25: note = Alpha-methyl-L-tyrosine
  SITE 47: note = Lysine amide is chemically modified through conjugation of the side chain with (6S,16S)-6,16-bis(aminomethyl)-4,7,15,18-tetraoxo-11-(4-oxo butanoyl)-5,8,11,14,17-pentaazahenicosanedioic acid (BEA-MalDap2) which is attached to two Fc sequences

SEQ ID NO: 720 - protein, 40 aa, synthetic construct; identical to SEQ ID NO: 459
  SITE 2: note = 2-aminoisobutyric acid
  SITE 6: note = (S)-2-amino-3-(2-fluorophenyl)-2-methylpropanoic acid
  SITE 10: note = 3-(4-pyridyl)-L-alanine
  SITE 13: note = Alpha-methyl-L-leucine
  SITE 17: note = Lysine is chemically modified through conjugation of the side chain with (2-[2-(2-amino-ethoxy)-ethoxy]-acetyl)2-Gamma-Glutamic acid-CO-(CH2)16-CO2H
  SITE 20: note = 2-aminoisobutyric acid
  SITE 24: note = D-Glutamic acid
  SITE 25: note = Alpha-methyl-L-tyrosine
  SITE 40: note = Lysine amide is chemically modified through conjugation of the side chain with (2-[2-(2-amino-ethoxy)-ethoxy]-acetyl)4-GKAAAEKAAAEKAAAE-(6 S,16S)-6,16-bis(aminomethyl)-4,7,15,18-tetraoxo-11-(4-oxobu tanoyl)-5,8,11,14,17-pentaazahenicosanedioic acid-IgG4 Fc with charge balancing mutations (Q274K - CH2, E355R - CH3, E419Q- CH3) (BEA-MalDap2-KRQ) which is attached to two Fc sequences

SEQ ID NO: 721 - protein, 40 aa, synthetic construct; identical to SEQ ID NO: 477
  SITE 2: note = 2-aminoisobutyric acid
  SITE 6: note = (S)-2-amino-3-(2-fluorophenyl)-2-methylpropanoic acid
  SITE 11: note = 2-aminoisobutyric acid
  SITE 13: note = Alpha-methyl-L-leucine
  SITE 17: note = Lysine is chemically modified through conjugation of the side chain with (2-[2-(2-amino-ethoxy)-ethoxy]-acetyl)2-Gamma-Glutamic acid-CO-(CH2)16-CO2H
  SITE 20: note = 2-aminoisobutyric acid
  SITE 24: note = D-Glutamic acid
  SITE 25: note = Alpha-methyl-L-tyrosine
  SITE 40: note = Lysine amide is chemically modified through conjugation of the side chain with 24x Polyethylene glycol-(6S,16S)-6,16-bis(aminomethyl)-4,7,15,18-tetraoxo-11 -(4-oxobutanoyl)-5,8,11,14,17-pentaazahenicosanedioic acid-IgG4 Fc with charge balancing mutations (Q274K - CH2, E355R - CH3, E419Q- CH3) (BEA-MalDap2-KRQ) which is attached to two Fc sequences

SEQ ID NO: 722 - protein, 41 aa, synthetic construct; identical to SEQ ID NO: 11
  SITE 2: note = 2-aminoisobutyric acid
  SITE 6: note = (S)-2-amino-3-(2-fluorophenyl)-2-methylpropanoic acid
  SITE 10: note = 3-(4-pyridyl)-L-alanine
  SITE 13: note = Alpha-methyl-L-leucine
  SITE 17: note = Lysine is chemically modified through conjugation of the side chain with (2-[2-(2-amino-ethoxy)-ethoxy]-acetyl)2-Gamma-Glutamic acid-CO-(CH2)16-CO2H
  SITE 20: note = 2-aminoisobutyric acid
  SITE 25: note = Alpha-methyl-L-tyrosine
  SITE 41: note = Amidated Serine

SEQ ID NO: 723 - protein, 55 aa, synthetic construct; identical to SEQ ID NO: 487
  SITE 2: note = 2-aminoisobutyric acid
  SITE 6: note = (S)-2-amino-3-(2-fluorophenyl)-2-methylpropanoic acid
  SITE 10: note = 3-(4-pyridyl)-L-alanine
  SITE 13: note = Alpha-methyl-L-leucine
  SITE 17: note = Lysine is chemically modified through conjugation of the side chain with (2-[2-(2-amino-ethoxy)-ethoxy]-acetyl)2-Gamma-Glutamic acid-CO-(CH2)16-CO2H
  SITE 20: note = 2-aminoisobutyric acid
  SITE 24: note = D-Glutamic acid
  SITE 25: note = Alpha-methyl-L-tyrosine
  SITE 55: note = Lysine amide is chemically modified through conjugation of the side chain with (6S,16S)-6,16-bis(aminomethyl)-4,7,15,18-tetraoxo-11-(4-oxo butanoyl)-5,8,11,14,17-pentaazahenicosanedioic acid-IgG4 Fc with charge balancing mutations (Q274K - CH2, E355R - CH3, E419Q- CH3) (BEA-MalDap2-KRQ) which is attached to two Fc sequences

SEQ ID NO: 724 - protein, 40 aa, synthetic construct; identical to SEQ ID NO: 460
  SITE 2: note = 2-aminoisobutyric acid
  SITE 6: note = (S)-2-amino-3-(2-fluorophenyl)-2-methylpropanoic acid
  SITE 10: note = 3-(4-pyridyl)-L-alanine
  SITE 13: note = Alpha-methyl-L-leucine
  SITE 16: note = Ornithine
  SITE 17: note = Lysine is chemically modified through conjugation of the side chain with epsilon-Lysine-epsilon-Lysine-Gamma-Glutamic acid-CO-(CH2)16-CO2H
  SITE 20: note = 2-aminoisobutyric acid
  SITE 24: note = D-Glutamic acid
  SITE 25: note = Alpha-methyl-L-tyrosine
  SITE 40: note = Lysine amide is chemically modified through conjugation of the side chain with 24x Polyethylene glycol-(6S,16S)-6,16-bis(aminomethyl)-4,7,15,18-tetraoxo-11 -(4-oxobutanoyl)-5,8,11,14,17-pentaazahenicosanedioic acid-IgG4 Fc with charge balancing mutations (Q274K - CH2, E355R - CH3, E419Q- CH3) (BEA-MalDap2-KRQ) which is attached to two Fc sequences

SEQ ID NO: 725 - protein, 47 aa, synthetic construct; identical to SEQ ID NO: 502
  SITE 2: note = 2-aminoisobutyric acid
  SITE 6: note = (S)-2-amino-3-(2-fluorophenyl)-2-methylpropanoic acid
  SITE 11: note = 2-aminoisobutyric acid
  SITE 13: note = Alpha-methyl-L-leucine
  SITE 16: note = Ornithine
  SITE 17: note = Lysine is chemically modified through conjugation of the side chain with (2-[2-(2-amino-ethoxy)-ethoxy]-acetyl)2-Gamma-Glutamic acid-CO-(CH2)16-CO2H
  SITE 20: note = 2-aminoisobutyric acid
  SITE 24: note = D-Glutamic acid
  SITE 25: note = Alpha-methyl-L-tyrosine
  SITE 47: note = Lysine amide is chemically modified through conjugation of the side chain with (6S,16S)-6,16-bis(aminomethyl)-4,7,15,18-tetraoxo-11-(4-oxo butanoyl)-5,8,11,14,17-pentaazahenicosanedioic acid-IgG4 Fc with charge balancing mutations (Q274K - CH2, E355R - CH3, E419Q- CH3) (BEA-MalDap2-KRQ) which is attached to two Fc sequences

SEQ ID NO: 726 - protein, 47 aa, synthetic construct; identical to SEQ ID NO: 504
  SITE 2: note = 2-aminoisobutyric acid
  SITE 6: note = (S)-2-amino-3-(2-fluorophenyl)-2-methylpropanoic acid
  SITE 10: note = 3-(4-pyridyl)-L-alanine
  SITE 13: note = Alpha-methyl-L-leucine
  SITE 16: note = Ornithine
  SITE 17: note = Lysine is chemically modified through conjugation of the side chain with (2-[2-(2-amino-ethoxy)-ethoxy]-acetyl)2-Gamma-Glutamic acid-CO-(CH2)16-CO2H
  SITE 20: note = 2-aminoisobutyric acid
  SITE 25: note = Alpha-methyl-L-tyrosine
  SITE 47: note = Lysine amide is chemically modified through conjugation of the side chain with (6S,16S)-6,16-bis(aminomethyl)-4,7,15,18-tetraoxo-11-(4-oxo butanoyl)-5,8,11,14,17-pentaazahenicosanedioic acid-IgG4 Fc with charge balancing mutations (Q274K - CH2, E355R - CH3, E419Q- CH3) (BEA-MalDap2-KRQ) which is attached to two Fc sequences

SEQ ID NO: 727 - protein, 60 aa, synthetic construct; identical to SEQ ID NO: 508
  SITE 2: note = 2-aminoisobutyric acid
  SITE 6: note = (S)-2-amino-3-(2-fluorophenyl)-2-methylpropanoic acid
  SITE 10: note = 3-(4-pyridyl)-L-alanine
  SITE 13: note = Alpha-methyl-L-leucine
  SITE 17: note = Lysine is chemically modified through conjugation of the side chain with (2-[2-(2-amino-ethoxy)-ethoxy]-acetyl)2-Gamma-Glutamic acid-CO-(CH2)16-CO2H
  SITE 20: note = 2-aminoisobutyric acid
  SITE 24: note = D-Glutamic acid
  SITE 25: note = Alpha-methyl-L-tyrosine
  SITE 60: note = Lysine amide is chemically modified through conjugation of the side chain with (6S,16S)-6,16-bis(aminomethyl)-4,7,15,18-tetraoxo-11-(4-oxo butanoyl)-5,8,11,14,17-pentaazahenicosanedioic acid-IgG4 Fc with charge balancing mutations (Q274K - CH2, E355R - CH3, E419Q- CH3) (BEA-MalDap2-KRQ) which is attached to two Fc sequences

SEQ ID NO: 728 - protein, 40 aa, synthetic construct; identical to SEQ ID NO: 459
  SITE 2: note = 2-aminoisobutyric acid
  SITE 6: note = (S)-2-amino-3-(2-fluorophenyl)-2-methylpropanoic acid
  SITE 10: note = 3-(4-pyridyl)-L-alanine
  SITE 13: note = Alpha-methyl-L-leucine
  SITE 17: note = Lysine is chemically modified through conjugation of the side chain with Gamma-Glutamic acid-2-[2-(2-amino-ethoxy)-ethoxy]-acetyl-epsilon-Lysine-CO -(CH2)18-CO2H
  SITE 20: note = 2-aminoisobutyric acid
  SITE 24: note = D-Glutamic acid
  SITE 25: note = Alpha-methyl-L-tyrosine
  SITE 40: note = Lysine amide is chemically modified through conjugation of the side chain with 24x Polyethylene glycol-(6S,16S)-6,16-bis(aminomethyl)-4,7,15,18-tetraoxo-11 -(4-oxobutanoyl)-5,8,11,14,17-pentaazahenicosanedioic acid-IgG4 Fc with charge balancing mutations (Q274K - CH2, E355R - CH3, E419Q- CH3) (BEA-MalDap2-KRQ) which is attached to two Fc sequences

SEQ ID NO: 729 - protein, 60 aa, synthetic construct; identical to SEQ ID NO: 521
  SITE 2: note = 2-aminoisobutyric acid
  SITE 6: note = (S)-2-amino-3-(2-fluorophenyl)-2-methylpropanoic acid
  SITE 10: note = 3-(4-pyridyl)-L-alanine
  SITE 11: note = 2-aminoisobutyric acid
  SITE 13: note = Alpha-methyl-L-leucine
  SITE 17: note = Lysine is chemically modified through conjugation of the side chain with (2-[2-(2-amino-ethoxy)-ethoxy]-acetyl)2-Gamma-Glutamic acid-CO-(CH2)16-CO2H
  SITE 20: note = 2-aminoisobutyric acid
  SITE 25: note = Alpha-methyl-L-tyrosine
  SITE 60: note = Lysine amide is chemically modified through conjugation of the side chain with (6S,16S)-6,16-bis(aminomethyl)-4,7,15,18-tetraoxo-11-(4-oxo butanoyl)-5,8,11,14,17-pentaazahenicosanedioic acid-IgG4 Fc with charge balancing mutations (Q274K - CH2, E355R - CH3, E419Q- CH3) (BEA-MalDap2-KRQ) which is attached to two Fc sequences

SEQ ID NO: 730 - protein, 63 aa, synthetic construct; identical to SEQ ID NO: 523
  SITE 2: note = 2-aminoisobutyric acid
  SITE 6: note = (S)-2-amino-3-(2-fluorophenyl)-2-methylpropanoic acid
  SITE 10: note = 3-(4-pyridyl)-L-alanine
  SITE 11: note = 2-aminoisobutyric acid
  SITE 13: note = Alpha-methyl-L-leucine
  SITE 17: note = Lysine is chemically modified through conjugation of the side chain with (2-[2-(2-amino-ethoxy)-ethoxy]-acetyl)2-Gamma-Glutamic acid-CO-(CH2)16-CO2H
  SITE 20: note = 2-aminoisobutyric acid
  SITE 25: note = Alpha-methyl-L-tyrosine
  SITE 63: note = Lysine amide is chemically modified through conjugation of the side chain with (6S,16S)-6,16-bis(aminomethyl)-4,7,15,18-tetraoxo-11-(4-oxo butanoyl)-5,8,11,14,17-pentaazahenicosanedioic acid-IgG4 Fc with charge balancing mutations (Q274K - CH2, E355R - CH3, E419Q- CH3) (BEA-MalDap2-KRQ) which is attached to two Fc sequences

SEQ ID NO: 731 - protein, 60 aa, synthetic construct; identical to SEQ ID NO: 525
  SITE 2: note = 2-aminoisobutyric acid
  SITE 6: note = (S)-2-amino-3-(2-fluorophenyl)-2-methylpropanoic acid
  SITE 10: note = 3-(4-pyridyl)-L-alanine
  SITE 13: note = Alpha-methyl-L-leucine
  SITE 17: note = Lysine is chemically modified through conjugation of the side chain with (2-[2-(2-amino-ethoxy)-ethoxy]-acetyl)2-Gamma-Glutamic acid-CO-(CH2)16-CO2H
  SITE 20: note = 2-aminoisobutyric acid
  SITE 25: note = Alpha-methyl-L-tyrosine
  SITE 60: note = Lysine amide is chemically modified through conjugation of the side chain with (6S,16S)-6,16-bis(aminomethyl)-4,7,15,18-tetraoxo-11-(4-oxo butanoyl)-5,8,11,14,17-pentaazahenicosanedioic acid-IgG4 Fc with charge balancing mutations (Q274K - CH2, E355R - CH3, E419Q- CH3) (BEA-MalDap2-KRQ) which is attached to two Fc sequences

SEQ ID NO: 732 - protein, 53 aa, synthetic construct; identical to SEQ ID NO: 526
  SITE 2: note = 2-aminoisobutyric acid
  SITE 6: note = (S)-2-amino-3-(2-fluorophenyl)-2-methylpropanoic acid
  SITE 10: note = 3-(4-pyridyl)-L-alanine
  SITE 13: note = Alpha-methyl-L-leucine
  SITE 17: note = Lysine is chemically modified through conjugation of the side chain with (2-[2-(2-amino-ethoxy)-ethoxy]-acetyl)2-Gamma-Glutamic acid-CO-(CH2)16-CO2H
  SITE 20: note = 2-aminoisobutyric acid
  SITE 25: note = Alpha-methyl-L-tyrosine
  SITE 53: note = Lysine amide is chemically modified through conjugation of the side chain with (6S,16S)-6,16-bis(aminomethyl)-4,7,15,18-tetraoxo-11-(4-oxo butanoyl)-5,8,11,14,17-pentaazahenicosanedioic acid-IgG4 Fc with charge balancing mutations (Q274K - CH2, E355R - CH3, E419Q- CH3) (BEA-MalDap2-KRQ) which is attached to two Fc sequences

SEQ ID NO: 733 - protein, 60 aa, synthetic construct; identical to SEQ ID NO: 539
  SITE 2: note = 2-aminoisobutyric acid
  SITE 6: note = (S)-2-amino-3-(2-fluorophenyl)-2-methylpropanoic acid
  SITE 10: note = 3-(4-pyridyl)-L-alanine
  SITE 13: note = Alpha-methyl-L-leucine
  SITE 17: note = Lysine is chemically modified through conjugation of the side chain with (2-[2-(2-amino-ethoxy)-ethoxy]-acetyl)2-Gamma-Glutamic acid-CO-(CH2)16-CO2H
  SITE 20: note = 2-aminoisobutyric acid
  SITE 25: note = Alpha-methyl-L-tyrosine
  SITE 60: note = Lysine amide is chemically modified through conjugation of the side chain with (6S,16S)-6,16-bis(aminomethyl)-4,7,15,18-tetraoxo-11-(4-oxo butanoyl)-5,8,11,14,17-pentaazahenicosanedioic acid-IgG4 Fc with charge balancing mutations (Q274K - CH2, E355R - CH3, E419Q- CH3) (BEA-MalDap2-KRQ) which is attached to two Fc sequences

SEQ ID NO: 734 - protein, 60 aa, synthetic construct; identical to SEQ ID NO: 540
  SITE 2: note = 2-aminoisobutyric acid
  SITE 6: note = (S)-2-amino-3-(2-fluorophenyl)-2-methylpropanoic acid
  SITE 10: note = 3-(4-pyridyl)-L-alanine
  SITE 13: note = Alpha-methyl-L-leucine
  SITE 17: note = Lysine is chemically modified through conjugation of the side chain with (2-[2-(2-amino-ethoxy)-ethoxy]-acetyl)2-Gamma-Glutamic acid-CO-(CH2)16-CO2H
  SITE 20: note = 2-aminoisobutyric acid
  SITE 25: note = Alpha-methyl-L-tyrosine
  SITE 60: note = Lysine amide is chemically modified through conjugation of the side chain with (6S,16S)-6,16-bis(aminomethyl)-4,7,15,18-tetraoxo-11-(4-oxo butanoyl)-5,8,11,14,17-pentaazahenicosanedioic acid-IgG4 Fc with charge balancing mutations (Q274K - CH2, E355R - CH3, E419Q- CH3) (BEA-MalDap2-KRQ) which is attached to two Fc sequences

SEQ ID NO: 735 - protein, 50 aa, synthetic construct; identical to SEQ ID NO: 541
  SITE 2: note = 2-aminoisobutyric acid
  SITE 6: note = (S)-2-amino-3-(2-fluorophenyl)-2-methylpropanoic acid
  SITE 10: note = 3-(4-pyridyl)-L-alanine
  SITE 13: note = Alpha-methyl-L-leucine
  SITE 16: note = Ornithine
  SITE 17: note = Lysine is chemically modified through conjugation of the side chain with (2-[2-(2-amino-ethoxy)-ethoxy]-acetyl)2-Gamma-Glutamic acid-CO-(CH2)16-CO2H
  SITE 20: note = 2-aminoisobutyric acid
  SITE 25: note = Alpha-methyl-L-tyrosine
  SITE 50: note = Lysine amide is chemically modified through conjugation of the side chain with (6S,16S)-6,16-bis(aminomethyl)-4,7,15,18-tetraoxo-11-(4-oxo butanoyl)-5,8,11,14,17-pentaazahenicosanedioic acid-IgG4 Fc with charge balancing mutations (Q274K - CH2, E355R - CH3, E419Q- CH3) (BEA-MalDap2-KRQ) which is attached to two Fc sequences

SEQ ID NO: 736 - protein, 60 aa, synthetic construct; identical to SEQ ID NO: 542
  SITE 2: note = 2-aminoisobutyric acid
  SITE 6: note = (S)-2-amino-3-(2-fluorophenyl)-2-methylpropanoic acid
  SITE 10: note = 3-(4-pyridyl)-L-alanine
  SITE 13: note = Alpha-methyl-L-leucine
  SITE 16: note = Ornithine
  SITE 17: note = Lysine is chemically modified through conjugation of the side chain with (2-[2-(2-amino-ethoxy)-ethoxy]-acetyl)2-Gamma-Glutamic acid-CO-(CH2)16-CO2H
  SITE 20: note = 2-aminoisobutyric acid
  SITE 25: note = Alpha-methyl-L-tyrosine
  SITE 60: note = Lysine amide is chemically modified through conjugation of the side chain with (6S,16S)-6,16-bis(aminomethyl)-4,7,15,18-tetraoxo-11-(4-oxo butanoyl)-5,8,11,14,17-pentaazahenicosanedioic acid-IgG4 Fc with charge balancing mutations (Q274K - CH2, E355R - CH3, E419Q- CH3) (BEA-MalDap2-KRQ) which is attached to two Fc sequences

SEQ ID NO: 737 - protein, 40 aa, synthetic construct; identical to SEQ ID NO: 551
  SITE 2: note = 2-aminoisobutyric acid
  SITE 6: note = (S)-2-amino-3-(2-fluorophenyl)-2-methylpropanoic acid
  SITE 10: note = 3-(4-pyridyl)-L-alanine
  SITE 13: note = Alpha-methyl-L-leucine
  SITE 16: note = Ornithine
  SITE 17: note = Lysine is chemically modified through conjugation of the side chain with (2-[2-(2-amino-ethoxy)-ethoxy]-acetyl)2-Gamma-Glutamic acid-CO-(CH2)16-CO2H
  SITE 20: note = 2-aminoisobutyric acid
  SITE 25: note = Alpha-methyl-L-tyrosine
  SITE 40: note = Lysine amide is chemically modified through conjugation of the side chain with (2-[2-(2-amino-ethoxy)-ethoxy]-acetyl)6-GPAPAPAPAPAPA-(6S,1 6S)-6,16-bis(aminomethyl)-4,7,15,18-tetraoxo-11-(4-oxobutan oyl)-5,8,11,14,17-pentaazahenicosanedioic acid-IgG4 Fc with charge balancing mutations (Q274K - CH2, E355R - CH3, E419Q- CH3) (BEA-MalDap2-KRQ) which is attached to two Fc sequences

SEQ ID NO: 738 - protein, 55 aa, synthetic construct; identical to SEQ ID NO: 555
  SITE 2: note = 2-aminoisobutyric acid
  SITE 6: note = (S)-2-amino-3-(2-fluorophenyl)-2-methylpropanoic acid
  SITE 10: note = 3-(4-pyridyl)-L-alanine
  SITE 11: note = 2-aminoisobutyric acid
  SITE 13: note = Alpha-methyl-L-leucine
  SITE 16: note = Ornithine
  SITE 17: note = Lysine is chemically modified through conjugation of the side chain with (2-[2-(2-amino-ethoxy)-ethoxy]-acetyl)2-Gamma-Glutamic acid-CO-(CH2)16-CO2H
  SITE 20: note = 2-aminoisobutyric acid
  SITE 25: note = Alpha-methyl-L-tyrosine
  SITE 55: note = Lysine amide is chemically modified through conjugation of the side chain with (6S,16S)-6,16-bis(aminomethyl)-4,7,15,18-tetraoxo-11-(4-oxo butanoyl)-5,8,11,14,17-pentaazahenicosanedioic acid-IgG4 Fc with charge balancing mutations (Q274K - CH2, E355R - CH3, E419Q- CH3) (BEA-MalDap2-KRQ) which is attached to two Fc sequences

SEQ ID NO: 739 - protein, 55 aa, synthetic construct; identical to SEQ ID NO: 556
  SITE 2: note = 2-aminoisobutyric acid
  SITE 6: note = (S)-2-amino-3-(2-fluorophenyl)-2-methylpropanoic acid
  SITE 10: note = 3-(4-pyridyl)-L-alanine
  SITE 13: note = Alpha-methyl-L-leucine
  SITE 16: note = Ornithine
  SITE 17: note = Lysine is chemically modified through conjugation of the side chain with (2-[2-(2-amino-ethoxy)-ethoxy]-acetyl)2-Gamma-Glutamic acid-CO-(CH2)16-CO2H
  SITE 20: note = 2-aminoisobutyric acid
  SITE 25: note = Alpha-methyl-L-tyrosine
  SITE 55: note = Lysine amide is chemically modified through conjugation of the side chain with (6S,16S)-6,16-bis(aminomethyl)-4,7,15,18-tetraoxo-11-(4-oxo butanoyl)-5,8,11,14,17-pentaazahenicosanedioic acid-IgG4 Fc with charge balancing mutations (Q274K - CH2, E355R - CH3, E419Q- CH3) (BEA-MalDap2-KRQ) which is attached to two Fc sequences

SEQ ID NO: 740 - protein, 55 aa, synthetic construct; identical to SEQ ID NO: 555
  SITE 2: note = 2-aminoisobutyric acid
  SITE 6: note = (S)-2-amino-3-(2-fluorophenyl)-2-methylpropanoic acid
  SITE 10: note = 3-(4-pyridyl)-L-alanine
  SITE 11: note = 2-aminoisobutyric acid
  SITE 13: note = Alpha-methyl-L-leucine
  SITE 16: note = Ornithine
  SITE 17: note = Lysine is chemically modified through conjugation of the side chain with (2-[2-(2-amino-ethoxy)-ethoxy]-acetyl)2-Gamma-Glutamic acid-CO-(CH2)16-CO2H
  SITE 20: note = 2-aminoisobutyric acid
  SITE 24: note = D-Glutamic acid
  SITE 25: note = Alpha-methyl-L-tyrosine
  SITE 55: note = Lysine amide is chemically modified through conjugation of the side chain with (6S,16S)-6,16-bis(aminomethyl)-4,7,15,18-tetraoxo-11-(4-oxo butanoyl)-5,8,11,14,17-pentaazahenicosanedioic acid-IgG4 Fc with charge balancing mutations (Q274K - CH2, E355R - CH3, E419Q- CH3) (BEA-MalDap2-KRQ) which is attached to two Fc sequences

SEQ ID NO: 741 - protein, 41 aa, synthetic construct; identical to SEQ ID NO: 28
  SITE 2: note = 2-aminoisobutyric acid
  SITE 6: note = (S)-2-amino-3-(2-fluorophenyl)-2-methylpropanoic acid
  SITE 10: note = 3-(4-pyridyl)-L-alanine
  SITE 13: note = Alpha-methyl-L-leucine
  SITE 16: note = Ornithine
  SITE 17: note = Lysine is chemically modified through conjugation of the side chain with (2-[2-(2-amino-ethoxy)-ethoxy]-acetyl)2-Gamma-Glutamic acid-CO-(CH2)16-CO2H
  SITE 20: note = 2-aminoisobutyric acid
  SITE 24: note = Lysine is chemically modified through conjugation of the side chain with GGGGSGGGGSGAPAPAPAPAPAPG-(6S,16S)-6,16-bis(aminomethyl)-4,7 ,15,18-tetraoxo-11-(4-oxobutanoyl)-5,8,11,14,17-pentaazahen icosanedioic acid-IgG4 Fc with charge balancing mutations (Q274K - CH2, E355R - CH3, E419Q- CH3) (BEA-MalDap2-KRQ) which is attached to two Fc sequences
  SITE 25: note = Alpha-methyl-L-tyrosine
  SITE 41: note = Amidated Serine

SEQ ID NO: 742 - protein, 41 aa, synthetic construct; identical to SEQ ID NO: 29
  SITE 2: note = 2-aminoisobutyric acid
  SITE 6: note = (S)-2-amino-3-(2-fluorophenyl)-2-methylpropanoic acid
  SITE 10: note = 3-(4-pyridyl)-L-alanine
  SITE 11: note = 2-aminoisobutyric acid
  SITE 13: note = Alpha-methyl-L-leucine
  SITE 16: note = Ornithine
  SITE 17: note = Lysine is chemically modified through conjugation of the side chain with (2-[2-(2-amino-ethoxy)-ethoxy]-acetyl)2-Gamma-Glutamic acid-CO-(CH2)16-CO2H
  SITE 20: note = 2-aminoisobutyric acid
  SITE 24: note = Lysine is chemically modified through conjugation of the side chain with GGGGSGGGGSGAPAPAPAPAPAPG-(6S,16S)-6,16-bis(aminomethyl)-4,7 ,15,18-tetraoxo-11-(4-oxobutanoyl)-5,8,11,14,17-pentaazahen icosanedioic acid-IgG4 Fc with charge balancing mutations (Q274K - CH2, E355R - CH3, E419Q- CH3) (BEA-MalDap2-KRQ) which is attached to two Fc sequences
  SITE 25: note = Alpha-methyl-L-tyrosine
  SITE 41: note = Amidated Serine

SEQ ID NO: 743 - protein, 35 aa, synthetic construct; identical to SEQ ID NO: 574
  SITE 2: note = 2-aminoisobutyric acid
  SITE 6: note = (S)-2-amino-3-(2-fluorophenyl)-2-methylpropanoic acid
  SITE 10: note = 3-(4-pyridyl)-L-alanine
  SITE 11: note = 2-aminoisobutyric acid
  SITE 13: note = Alpha-methyl-L-leucine
  SITE 16: note = Ornithine
  SITE 17: note = Lysine is chemically modified through conjugation of the side chain with epsilon-Lysine-epsilon-Lysine-Gamma-Glutamic acid-CO-(CH2)16-CO2H
  SITE 20: note = 2-aminoisobutyric acid
  SITE 25: note = Alpha-methyl-L-tyrosine
  SITE 35: note = Lysine amide is chemically modified through conjugation of the side chain with 24x Polyethylene glycol-(6S,16S)-6,16-bis(aminomethyl)-4,7,15,18-tetraoxo-11 -(4-oxobutanoyl)-5,8,11,14,17-pentaazahenicosanedioic acid-IgG4 Fc with charge balancing mutations (Q274K - CH2, E355R - CH3, E419Q- CH3) (BEA-MalDap2-KRQ) which is attached to two Fc sequences

SEQ ID NO: 744 - protein, 35 aa, synthetic construct; identical to SEQ ID NO: 574
  SITE 2: note = 2-aminoisobutyric acid
  SITE 6: note = (S)-2-amino-3-(2-fluorophenyl)-2-methylpropanoic acid
  SITE 10: note = 3-(4-pyridyl)-L-alanine
  SITE 11: note = 2-aminoisobutyric acid
  SITE 13: note = Alpha-methyl-L-leucine
  SITE 16: note = Ornithine
  SITE 17: note = Lysine is chemically modified through conjugation of the side chain with (2-[2-(2-amino-ethoxy)-ethoxy]-acetyl)2-Gamma-Glutamic acid-CO-(CH2)16-CO2H
  SITE 20: note = 2-aminoisobutyric acid
  SITE 25: note = Alpha-methyl-L-tyrosine
  SITE 35: note = Lysine amide is chemically modified through conjugation of the side chain with 24x Polyethylene glycol-(6S,16S)-6,16-bis(aminomethyl)-4,7,15,18-tetraoxo-11 -(4-oxobutanoyl)-5,8,11,14,17-pentaazahenicosanedioic acid-IgG4 Fc with charge balancing mutations (Q274K - CH2, E355R - CH3, E419Q- CH3) (BEA-MalDap2-KRQ) which is attached to two Fc sequences

SEQ ID NO: 745 - protein, 31 aa, synthetic construct; identical to SEQ ID NO: 22
  SITE 2: note = 2-aminoisobutyric acid
  SITE 6: note = (S)-2-amino-3-(2-fluorophenyl)-2-methylpropanoic acid
  SITE 10: note = 3-(4-pyridyl)-L-alanine
  SITE 11: note = 2-aminoisobutyric acid
  SITE 13: note = Alpha-methyl-L-leucine
  SITE 16: note = Ornithine
  SITE 17: note = Lysine is chemically modified through conjugation of the side chain with (2-[2-(2-amino-ethoxy)-ethoxy]-acetyl)2-Gamma-Glutamic acid-CO-(CH2)16-CO2H
  SITE 20: note = 2-aminoisobutyric acid
  SITE 25: note = Alpha-methyl-L-tyrosine
  SITE 31: note = Residue attached via 24x polyethylene glycol to lysine amide chemically modified through conjugation of the side chain with (6S,16S)-6,16-bis(aminomethyl)-4,7,15,18-tetraoxo-11-(4-oxo butanoyl)-5,8,11,14,17-pentaazahenicosanedioic acid-IgG4 Fc with charge balancing mutations (Q274K - CH2, E355R - CH3, E419Q- CH3) (BEA-MalDap2-KRQ) which is attached to two Fc sequences

SEQ ID NO: 746 - protein, 47 aa, synthetic construct; identical to SEQ ID NO: 505
  SITE 2: note = 2-aminoisobutyric acid
  SITE 6: note = (S)-2-amino-3-(2-fluorophenyl)-2-methylpropanoic acid
  SITE 10: note = 3-(4-pyridyl)-L-alanine
  SITE 11: note = 2-aminoisobutyric acid
  SITE 13: note = Alpha-methyl-L-leucine
  SITE 16: note = Ornithine
  SITE 17: note = Lysine is chemically modified through conjugation of the side chain with (2-[2-(2-amino-ethoxy)-ethoxy]-acetyl)2-Gamma-Glutamic acid-CO-(CH2)14-CO2H
  SITE 20: note = 2-aminoisobutyric acid
  SITE 25: note = Alpha-methyl-L-tyrosine
  SITE 47: note = Lysine amide is chemically modified through conjugation of the side chain with (6S,16S)-6,16-bis(aminomethyl)-4,7,15,18-tetraoxo-11-(4-oxo butanoyl)-5,8,11,14,17-pentaazahenicosanedioic acid-IgG4 Fc with charge balancing mutations (Q274K - CH2, E355R - CH3, E419Q- CH3) (BEA-MalDap2-KRQ) which is attached to two Fc sequences

SEQ ID NO: 747 - protein, 40 aa, synthetic construct; identical to SEQ ID NO: 591
  SITE 2: note = 2-aminoisobutyric acid
  SITE 6: note = (S)-2-amino-3-(2-fluorophenyl)-2-methylpropanoic acid
  SITE 10: note = 3-(4-pyridyl)-L-alanine
  SITE 11: note = 2-aminoisobutyric acid
  SITE 13: note = Alpha-methyl-L-leucine
  SITE 16: note = Ornithine
  SITE 17: note = Lysine is chemically modified through conjugation of the side chain with (2-[2-(2-amino-ethoxy)-ethoxy]-acetyl)2-Gamma-Glutamic acid-CO-(CH2)16-CO2H
  SITE 20: note = 2-aminoisobutyric acid
  SITE 25: note = Alpha-methyl-L-tyrosine
  SITE 40: note = Lysine amide is chemically modified through conjugation of the side chain with 24x Polyethylene glycol-(6S,16S)-6,16-bis(aminomethyl)-4,7,15,18-tetraoxo-11 -(4-oxobutanoyl)-5,8,11,14,17-pentaazahenicosanedioic acid-IgG4 Fc with charge balancing mutations (Q274K - CH2, E355R - CH3, E419Q- CH3) (BEA-MalDap2-KRQ) which is attached to two Fc sequences

SEQ ID NO: 748 - protein, 40 aa, synthetic construct; identical to SEQ ID NO: 591
  SITE 2: note = 2-aminoisobutyric acid
  SITE 6: note = (S)-2-amino-3-(2-fluorophenyl)-2-methylpropanoic acid
  SITE 10: note = 3-(4-pyridyl)-L-alanine
  SITE 11: note = 2-aminoisobutyric acid
  SITE 13: note = Alpha-methyl-L-leucine
  SITE 16: note = Ornithine
  SITE 17: note = Lysine is chemically modified through conjugation of the side chain with epsilon-Lysine-epsilon-Lysine-Gamma-Glutamic acid-CO-(CH2)16-CO2H
  SITE 20: note = 2-aminoisobutyric acid
  SITE 25: note = Alpha-methyl-L-tyrosine
  SITE 40: note = Lysine amide is chemically modified through conjugation of the side chain with 24x Polyethylene glycol-(6S,16S)-6,16-bis(aminomethyl)-4,7,15,18-tetraoxo-11 -(4-oxobutanoyl)-5,8,11,14,17-pentaazahenicosanedioic acid-IgG4 Fc with charge balancing mutations (Q274K - CH2, E355R - CH3, E419Q- CH3) (BEA-MalDap2-KRQ) which is attached to two Fc sequences

SEQ ID NO: 749 - protein, 40 aa, synthetic construct; identical to SEQ ID NO: 474
  SITE 2: note = 2-aminoisobutyric acid
  SITE 6: note = (S)-2-amino-3-(2-fluorophenyl)-2-methylpropanoic acid
  SITE 10: note = 3-(4-pyridyl)-L-alanine
  SITE 11: note = 2-aminoisobutyric acid
  SITE 13: note = Alpha-methyl-L-leucine
  SITE 17: note = Lysine is chemically modified through conjugation of the side chain with epsilon-Lysine-epsilon-Lysine-Gamma-Glutamic acid-CO-(CH2)16-CO2H
  SITE 20: note = 2-aminoisobutyric acid
  SITE 25: note = Alpha-methyl-L-tyrosine
  SITE 40: note = Lysine amide is chemically modified through conjugation of the side chain with 24x Polyethylene glycol-(6S,16S)-6,16-bis(aminomethyl)-4,7,15,18-tetraoxo-11 -(4-oxobutanoyl)-5,8,11,14,17-pentaazahenicosanedioic acid-IgG4 Fc with charge balancing mutations (Q274K - CH2, E355R - CH3, E419Q- CH3) (BEA-MalDap2-KRQ) which is attached to two Fc sequences

SEQ ID NO: 750 - protein, 40 aa, synthetic construct; identical to SEQ ID NO: 594
  SITE 2: note = 2-aminoisobutyric acid
  SITE 6: note = (S)-2-amino-3-(2-fluorophenyl)-2-methylpropanoic acid
  SITE 10: note = 3-(4-pyridyl)-L-alanine
  SITE 11: note = 2-aminoisobutyric acid
  SITE 13: note = Alpha-methyl-L-leucine
  SITE 16: note = Ornithine
  SITE 17: note = Lysine is chemically modified through conjugation of the side chain with (2-[2-(2-amino-ethoxy)-ethoxy]-acetyl)2-Gamma-Glutamic acid-CO-(CH2)16-CO2H
  SITE 20: note = 2-aminoisobutyric acid
  SITE 25: note = Alpha-methyl-L-tyrosine
  SITE 40: note = Lysine amide is chemically modified through conjugation of the side chain with 24x Polyethylene glycol-(6S,16S)-6,16-bis(aminomethyl)-4,7,15,18-tetraoxo-11 -(4-oxobutanoyl)-5,8,11,14,17-pentaazahenicosanedioic acid-IgG4 Fc with charge balancing mutations (Q274K - CH2, E355R - CH3, E419Q- CH3) (BEA-MalDap2-KRQ) which is attached to two Fc sequences

SEQ ID NO: 751 - protein, 40 aa, synthetic construct; identical to SEQ ID NO: 594
  SITE 2: note = 2-aminoisobutyric acid
  SITE 6: note = (S)-2-amino-3-(2-fluorophenyl)-2-methylpropanoic acid
  SITE 10: note = 3-(4-pyridyl)-L-alanine
  SITE 11: note = 2-aminoisobutyric acid
  SITE 13: note = Alpha-methyl-L-leucine
  SITE 16: note = Ornithine
  SITE 17: note = Lysine is chemically modified through conjugation of the side chain with epsilon-Lysine-epsilon-Lysine-Gamma-Glutamic acid-CO-(CH2)16-CO2H
  SITE 20: note = 2-aminoisobutyric acid
  SITE 25: note = Alpha-methyl-L-tyrosine
  SITE 40: note = Lysine amide is chemically modified through conjugation of the side chain with 24x Polyethylene glycol-(6S,16S)-6,16-bis(aminomethyl)-4,7,15,18-tetraoxo-11 -(4-oxobutanoyl)-5,8,11,14,17-pentaazahenicosanedioic acid-IgG4 Fc with charge balancing mutations (Q274K - CH2, E355R - CH3, E419Q- CH3) (BEA-MalDap2-KRQ) which is attached to two Fc sequences

SEQ ID NO: 752 - protein, 40 aa, synthetic construct; identical to SEQ ID NO: 596
  SITE 2: note = 2-aminoisobutyric acid
  SITE 6: note = (S)-2-amino-3-(2-fluorophenyl)-2-methylpropanoic acid
  SITE 10: note = 3-(4-pyridyl)-L-alanine
  SITE 11: note = 2-aminoisobutyric acid
  SITE 13: note = Alpha-methyl-L-leucine
  SITE 17: note = Lysine is chemically modified through conjugation of the side chain with epsilon-Lysine-epsilon-Lysine-Gamma-Glutamic acid-CO-(CH2)16-CO2H
  SITE 20: note = 2-aminoisobutyric acid
  SITE 25: note = Alpha-methyl-L-tyrosine
  SITE 40: note = Lysine amide is chemically modified through conjugation of the side chain with 24x Polyethylene glycol-(6S,16S)-6,16-bis(aminomethyl)-4,7,15,18-tetraoxo-11 -(4-oxobutanoyl)-5,8,11,14,17-pentaazahenicosanedioic acid-IgG4 Fc with charge balancing mutations (Q274K - CH2, E355R - CH3, E419Q- CH3) (BEA-MalDap2-KRQ) which is attached to two Fc sequences

SEQ ID NO: 753 - protein, 40 aa, synthetic construct; identical to SEQ ID NO: 591
  SITE 2: note = 2-aminoisobutyric acid
  SITE 6: note = (S)-2-amino-3-(2-fluorophenyl)-2-methylpropanoic acid
  SITE 10: note = 3-(4-pyridyl)-L-alanine
  SITE 11: note = 2-aminoisobutyric acid
  SITE 13: note = Alpha-methyl-L-leucine
  SITE 16: note = Ornithine
  SITE 17: note = Lysine is chemically modified through conjugation of the side chain with epsilon-Lysine-epsilon-Lysine-Gamma-Glutamic acid-CO-(CH2)16-CO2H
  SITE 20: note = 2-aminoisobutyric acid
  SITE 24: note = D-Glutamic acid
  SITE 25: note = Alpha-methyl-L-tyrosine
  SITE 40: note = Lysine amide is chemically modified through conjugation of the side chain with 24x Polyethylene glycol-(6S,16S)-6,16-bis(aminomethyl)-4,7,15,18-tetraoxo-11 -(4-oxobutanoyl)-5,8,11,14,17-pentaazahenicosanedioic acid-IgG4 Fc with charge balancing mutations (Q274K - CH2, E355R - CH3, E419Q- CH3) (BEA-MalDap2-KRQ) which is attached to two Fc sequences

SEQ ID NO: 754 - protein, 32 aa, synthetic construct; identical to SEQ ID NO: 576
  SITE 2: note = 2-aminoisobutyric acid
  SITE 6: note = (S)-2-amino-3-(2-fluorophenyl)-2-methylpropanoic acid
  SITE 10: note = 3-(4-pyridyl)-L-alanine
  SITE 11: note = 2-aminoisobutyric acid
  SITE 13: note = Alpha-methyl-L-leucine
  SITE 16: note = Ornithine
  SITE 17: note = Lysine is chemically modified through conjugation of the side chain with epsilon-Lysine-epsilon-Lysine-Gamma-Glutamic acid-CO-(CH2)16-CO2H
  SITE 20: note = 2-aminoisobutyric acid
  SITE 24: note = D-Glutamic acid
  SITE 25: note = Alpha-methyl-L-tyrosine
  SITE 32: note = Lysine amide is chemically modified through conjugation of the side chain with 24x Polyethylene glycol-(6S,16S)-6,16-bis(aminomethyl)-4,7,15,18-tetraoxo-11 -(4-oxobutanoyl)-5,8,11,14,17-pentaazahenicosanedioic acid-IgG4 Fc with charge balancing mutations (Q274K - CH2, E355R - CH3, E419Q- CH3) (BEA-MalDap2-KRQ) which is attached to two Fc sequences

SEQ ID NO: 755 - protein, 40 aa, synthetic construct; identical to SEQ ID NO: 599
  SITE 2: note = 2-aminoisobutyric acid
  SITE 6: note = (S)-2-amino-3-(2-fluorophenyl)-2-methylpropanoic acid
  SITE 10: note = 3-(4-pyridyl)-L-alanine
  SITE 11: note = 2-aminoisobutyric acid
  SITE 13: note = Alpha-methyl-L-leucine
  SITE 16: note = Ornithine
  SITE 17: note = Lysine is chemically modified through conjugation of the side chain with epsilon-Lysine-epsilon-Lysine-Gamma-Glutamic acid-CO-(CH2)16-CO2H
  SITE 20: note = 2-aminoisobutyric acid
  SITE 25: note = Alpha-methyl-L-tyrosine
  SITE 31: note = Ornithine
  SITE 40: note = Lysine amide is chemically modified through conjugation of the side chain with 24x Polyethylene glycol-(6S,16S)-6,16-bis(aminomethyl)-4,7,15,18-tetraoxo-11 -(4-oxobutanoyl)-5,8,11,14,17-pentaazahenicosanedioic acid-IgG4 Fc with charge balancing mutations (Q274K - CH2, E355R - CH3, E419Q- CH3) (BEA-MalDap2-KRQ) which is attached to two Fc sequences

SEQ ID NO: 756 - protein, 40 aa, synthetic construct; identical to SEQ ID NO: 599
  SITE 2: note = 2-aminoisobutyric acid
  SITE 6: note = (S)-2-amino-3-(2-fluorophenyl)-2-methylpropanoic acid
  SITE 10: note = 3-(4-pyridyl)-L-alanine
  SITE 11: note = 2-aminoisobutyric acid
  SITE 13: note = Alpha-methyl-L-leucine
  SITE 16: note = Ornithine
  SITE 17: note = Lysine is chemically modified through conjugation of the side chain with (2-[2-(2-amino-ethoxy)-ethoxy]-acetyl)2-Gamma-Glutamic acid-CO-(CH2)16-CO2H
  SITE 20: note = 2-aminoisobutyric acid
  SITE 25: note = Alpha-methyl-L-tyrosine
  SITE 31: note = Ornithine
  SITE 40: note = Lysine amide is chemically modified through conjugation of the side chain with 24x Polyethylene glycol-(6S,16S)-6,16-bis(aminomethyl)-4,7,15,18-tetraoxo-11 -(4-oxobutanoyl)-5,8,11,14,17-pentaazahenicosanedioic acid-IgG4 Fc with charge balancing mutations (Q274K - CH2, E355R - CH3, E419Q- CH3) (BEA-MalDap2-KRQ) which is attached to two Fc sequences

SEQ ID NO: 757 - protein, 32 aa, synthetic construct; identical to SEQ ID NO: 601
  SITE 2: note = 2-aminoisobutyric acid
  SITE 6: note = (S)-2-amino-3-(2-fluorophenyl)-2-methylpropanoic acid
  SITE 10: note = 3-(4-pyridyl)-L-alanine
  SITE 11: note = 2-aminoisobutyric acid
  SITE 13: note = Alpha-methyl-L-leucine
  SITE 16: note = Ornithine
  SITE 17: note = Lysine is chemically modified through conjugation of the side chain with epsilon-Lysine-epsilon-Lysine-Gamma-Glutamic acid-CO-(CH2)16-CO2H
  SITE 20: note = 2-aminoisobutyric acid
  SITE 25: note = Alpha-methyl-L-tyrosine
  SITE 31: note = Ornithine
  SITE 32: note = Lysine amide is chemically modified through conjugation of the side chain with 24x Polyethylene glycol-(6S,16S)-6,16-bis(aminomethyl)-4,7,15,18-tetraoxo-11 -(4-oxobutanoyl)-5,8,11,14,17-pentaazahenicosanedioic acid-IgG4 Fc with charge balancing mutations (Q274K - CH2, E355R - CH3, E419Q- CH3) (BEA-MalDap2-KRQ) which is attached to two Fc sequences

SEQ ID NO: 758 - protein, 32 aa, synthetic construct; identical to SEQ ID NO: 601
  SITE 2: note = 2-aminoisobutyric acid
  SITE 6: note = (S)-2-amino-3-(2-fluorophenyl)-2-methylpropanoic acid
  SITE 10: note = 3-(4-pyridyl)-L-alanine
  SITE 11: note = 2-aminoisobutyric acid
  SITE 13: note = Alpha-methyl-L-leucine
  SITE 16: note = Ornithine
  SITE 17: note = Lysine is chemically modified through conjugation of the side chain with (2-[2-(2-amino-ethoxy)-ethoxy]-acetyl)2-Gamma-Glutamic acid-CO-(CH2)16-CO2H
  SITE 20: note = 2-aminoisobutyric acid
  SITE 25: note = Alpha-methyl-L-tyrosine
  SITE 31: note = Ornithine
  SITE 32: note = Lysine amide is chemically modified through conjugation of the side chain with 24x Polyethylene glycol-(6S,16S)-6,16-bis(aminomethyl)-4,7,15,18-tetraoxo-11 -(4-oxobutanoyl)-5,8,11,14,17-pentaazahenicosanedioic acid-IgG4 Fc with charge balancing mutations (Q274K - CH2, E355R - CH3, E419Q- CH3) (BEA-MalDap2-KRQ) which is attached to two Fc sequences

SEQ ID NO: 759 - protein, 40 aa, synthetic construct; identical to SEQ ID NO: 603
  SITE 2: note = 2-aminoisobutyric acid
  SITE 6: note = (S)-2-amino-3-(2-fluorophenyl)-2-methylpropanoic acid
  SITE 10: note = 3-(4-pyridyl)-L-alanine
  SITE 11: note = 2-aminoisobutyric acid
  SITE 13: note = Alpha-methyl-L-leucine
  SITE 16: note = Ornithine
  SITE 17: note = Lysine is chemically modified through conjugation of the side chain with epsilon-Lysine-epsilon-Lysine-Gamma-Glutamic acid-CO-(CH2)16-CO2H
  SITE 20: note = 2-aminoisobutyric acid
  SITE 21: note = Ornithine
  SITE 25: note = Alpha-methyl-L-tyrosine
  SITE 40: note = Lysine amide is chemically modified through conjugation of the side chain with 24x Polyethylene glycol-(6S,16S)-6,16-bis(aminomethyl)-4,7,15,18-tetraoxo-11 -(4-oxobutanoyl)-5,8,11,14,17-pentaazahenicosanedioic acid-IgG4 Fc with charge balancing mutations (Q274K - CH2, E355R - CH3, E419Q- CH3) (BEA-MalDap2-KRQ) which is attached to two Fc sequences

SEQ ID NO: 760 - protein, 40 aa, synthetic construct; identical to SEQ ID NO: 603
  SITE 2: note = 2-aminoisobutyric acid
  SITE 6: note = (S)-2-amino-3-(2-fluorophenyl)-2-methylpropanoic acid
  SITE 10: note = 3-(4-pyridyl)-L-alanine
  SITE 11: note = 2-aminoisobutyric acid
  SITE 13: note = Alpha-methyl-L-leucine
  SITE 16: note = Ornithine
  SITE 17: note = Lysine is chemically modified through conjugation of the side chain with (2-[2-(2-amino-ethoxy)-ethoxy]-acetyl)2-Gamma-Glutamic acid-CO-(CH2)16-CO2H
  SITE 20: note = 2-aminoisobutyric acid
  SITE 21: note = Ornithine
  SITE 25: note = Alpha-methyl-L-tyrosine
  SITE 40: note = Lysine amide is chemically modified through conjugation of the side chain with 24x Polyethylene glycol-(6S,16S)-6,16-bis(aminomethyl)-4,7,15,18-tetraoxo-11 -(4-oxobutanoyl)-5,8,11,14,17-pentaazahenicosanedioic acid-IgG4 Fc with charge balancing mutations (Q274K - CH2, E355R - CH3, E419Q- CH3) (BEA-MalDap2-KRQ) which is attached to two Fc sequences

SEQ ID NO: 761 - protein, 40 aa, synthetic construct; identical to SEQ ID NO: 605
  SITE 2: note = 2-aminoisobutyric acid
  SITE 6: note = (S)-2-amino-3-(2-fluorophenyl)-2-methylpropanoic acid
  SITE 10: note = 3-(4-pyridyl)-L-alanine
  SITE 11: note = 2-aminoisobutyric acid
  SITE 13: note = Alpha-methyl-L-leucine
  SITE 16: note = Ornithine
  SITE 17: note = Lysine is chemically modified through conjugation of the side chain with (2-[2-(2-amino-ethoxy)-ethoxy]-acetyl)2-Gamma-Glutamic acid-CO-(CH2)16-CO2H
  SITE 20: note = 2-aminoisobutyric acid
  SITE 25: note = Alpha-methyl-L-tyrosine
  SITE 40: note = Lysine amide is chemically modified through conjugation of the side chain with 24x Polyethylene glycol-(6S,16S)-6,16-bis(aminomethyl)-4,7,15,18-tetraoxo-11 -(4-oxobutanoyl)-5,8,11,14,17-pentaazahenicosanedioic acid-IgG4 Fc with charge balancing mutations (Q274K - CH2, E355R - CH3, E419Q- CH3) (BEA-MalDap2-KRQ) which is attached to two Fc sequences

SEQ ID NO: 762 - protein, 40 aa, synthetic construct; identical to SEQ ID NO: 605
  SITE 2: note = 2-aminoisobutyric acid
  SITE 6: note = (S)-2-amino-3-(2-fluorophenyl)-2-methylpropanoic acid
  SITE 10: note = 3-(4-pyridyl)-L-alanine
  SITE 11: note = 2-aminoisobutyric acid
  SITE 13: note = Alpha-methyl-L-leucine
  SITE 16: note = Ornithine
  SITE 17: note = Lysine is chemically modified through conjugation of the side chain with epsilon-Lysine-epsilon-Lysine-Gamma-Glutamic acid-CO-(CH2)16-CO2H
  SITE 20: note = 2-aminoisobutyric acid
  SITE 25: note = Alpha-methyl-L-tyrosine
  SITE 40: note = Lysine amide is chemically modified through conjugation of the side chain with 24x Polyethylene glycol-(6S,16S)-6,16-bis(aminomethyl)-4,7,15,18-tetraoxo-11 -(4-oxobutanoyl)-5,8,11,14,17-pentaazahenicosanedioic acid-IgG4 Fc with charge balancing mutations (Q274K - CH2, E355R - CH3, E419Q- CH3) (BEA-MalDap2-KRQ) which is attached to two Fc sequences

SEQ ID NO: 763 - protein, 40 aa, synthetic construct; identical to SEQ ID NO: 591
  SITE 2: note = 2-aminoisobutyric acid
  SITE 6: note = (S)-2-amino-3-(2-fluorophenyl)-2-methylpropanoic acid
  SITE 10: note = 3-(4-pyridyl)-L-alanine
  SITE 11: note = 2-aminoisobutyric acid
  SITE 13: note = Alpha-methyl-L-leucine
  SITE 16: note = Ornithine
  SITE 17: note = Lysine is chemically modified through conjugation of the side chain with (2-[2-(2-amino-ethoxy)-ethoxy]-acetyl)2-Gamma-Glutamic acid-CO-(CH2)16-CO2H
  SITE 20: note = 2-aminoisobutyric acid
  SITE 25: note = Alpha-methyl-L-tyrosine
  SITE 40: note = Lysine amide is chemically modified through conjugation of the side chain with (2-[2-(2-amino-ethoxy)-ethoxy]-acetyl)6-GPAPAPAPAPAPA-(6S,1 6S)-6,16-bis(aminomethyl)-4,7,15,18-tetraoxo-11-(4-oxobutan oyl)-5,8,11,14,17-pentaazahenicosanedioic acid-IgG4 Fc with charge balancing mutations (Q274K - CH2, E355R - CH3, E419Q- CH3) (BEA-MalDap2-KRQ) which is attached to two Fc sequences

SEQ ID NO: 764 - protein, 40 aa, synthetic construct; identical to SEQ ID NO: 460
  SITE 2: note = 2-aminoisobutyric acid
  SITE 6: note = (S)-2-amino-3-(2-fluorophenyl)-2-methylpropanoic acid
  SITE 10: note = 3-(4-pyridyl)-L-alanine
  SITE 13: note = Alpha-methyl-L-leucine
  SITE 16: note = Ornithine
  SITE 17: note = Lysine is chemically modified through conjugation of the side chain with (2-[2-(2-amino-ethoxy)-ethoxy]-acetyl)2-Gamma-Glutamic acid-CO-(CH2)16-CO2H
  SITE 20: note = 2-aminoisobutyric acid
  SITE 25: note = Alpha-methyl-L-tyrosine
  SITE 40: note = Lysine amide is chemically modified through conjugation of the side chain with (2-[2-(2-amino-ethoxy)-ethoxy]-acetyl)6-GPAPAPAPAPAPA-(6S,1 6S)-6,16-bis(aminomethyl)-4,7,15,18-tetraoxo-11-(4-oxobutan oyl)-5,8,11,14,17-pentaazahenicosanedioic acid-IgG4 Fc with charge balancing mutations (Q274K - CH2, E355R - CH3, E419Q- CH3) (BEA-MalDap2-KRQ) which is attached to two Fc sequences

SEQ ID NO: 765 - protein, 40 aa, synthetic construct; identical to SEQ ID NO: 460
  SITE 2: note = 2-aminoisobutyric acid
  SITE 6: note = (S)-2-amino-3-(2-fluorophenyl)-2-methylpropanoic acid
  SITE 10: note = 3-(4-pyridyl)-L-alanine
  SITE 13: note = Alpha-methyl-L-leucine
  SITE 16: note = Ornithine
  SITE 17: note = Lysine is chemically modified through conjugation of the side chain with epsilon-Lysine-epsilon-Lysine-Gamma-Glutamic acid-CO-(CH2)16-CO2H
  SITE 20: note = 2-aminoisobutyric acid
  SITE 25: note = Alpha-methyl-L-tyrosine
  SITE 40: note = Lysine amide is chemically modified through conjugation of the side chain with (2-[2-(2-amino-ethoxy)-ethoxy]-acetyl)6-GPAPAPAPAPAPA-(6S,1 6S)-6,16-bis(aminomethyl)-4,7,15,18-tetraoxo-11-(4-oxobutan oyl)-5,8,11,14,17-pentaazahenicosanedioic acid-IgG4 Fc with charge balancing mutations (Q274K - CH2, E355R - CH3, E419Q- CH3) (BEA-MalDap2-KRQ) which is attached to two Fc sequences

SEQ ID NO: 766 - protein, 40 aa, synthetic construct; identical to SEQ ID NO: 460
  SITE 2: note = 2-aminoisobutyric acid
  SITE 6: note = (S)-2-amino-3-(2-fluorophenyl)-2-methylpropanoic acid
  SITE 10: note = 3-(4-pyridyl)-L-alanine
  SITE 13: note = Alpha-methyl-L-leucine
  SITE 16: note = Ornithine
  SITE 17: note = Lysine is chemically modified through conjugation of the side chain with epsilon-Lysine-epsilon-Lysine-Gamma-Glutamic acid-CO-(CH2)16-CO2H
  SITE 20: note = 2-aminoisobutyric acid
  SITE 24: note = D-Glutamic acid
  SITE 25: note = Alpha-methyl-L-tyrosine
  SITE 40: note = Lysine amide is chemically modified through conjugation of the side chain with (2-[2-(2-amino-ethoxy)-ethoxy]-acetyl)6-GPAPAPAPAPAPA-(6S,1 6S)-6,16-bis(aminomethyl)-4,7,15,18-tetraoxo-11-(4-oxobutan oyl)-5,8,11,14,17-pentaazahenicosanedioic acid-IgG4 Fc with charge balancing mutations (Q274K - CH2, E355R - CH3, E419Q- CH3) (BEA-MalDap2-KRQ) which is attached to two Fc sequences

SEQ ID NO: 767 - protein, 40 aa, synthetic construct; identical to SEQ ID NO: 591
  SITE 2: note = 2-aminoisobutyric acid
  SITE 6: note = (S)-2-amino-3-(2-fluorophenyl)-2-methylpropanoic acid
  SITE 10: note = 3-(4-pyridyl)-L-alanine
  SITE 11: note = 2-aminoisobutyric acid
  SITE 13: note = Alpha-methyl-L-leucine
  SITE 16: note = Ornithine
  SITE 17: note = Lysine is chemically modified through conjugation of the side chain with (2-[2-(2-amino-ethoxy)-ethoxy]-acetyl)2-Gamma-Glutamic acid-CO-(CH2)16-CO2H
  SITE 20: note = 2-aminoisobutyric acid
  SITE 25: note = Alpha-methyl-L-tyrosine
  SITE 40: note = Lysine amide is chemically modified through conjugation of the side chain with (2-[2-(2-amino-ethoxy)-ethoxy]-acetyl)6-(6S,16S)-6,16-bis(a minomethyl)-4,7,15,18-tetraoxo-11-(4-oxobutanoyl)-5,8,11,14 ,17-pentaazahenicosanedioic acid-IgG4 Fc with charge balancing mutations (Q274K - CH2, E355R - CH3, E419Q- CH3) (BEA-MalDap2-KRQ) which is attached to two Fc sequences

SEQ ID NO: 768 - protein, 40 aa, synthetic construct; identical to SEQ ID NO: 460
  SITE 2: note = 2-aminoisobutyric acid
  SITE 6: note = (S)-2-amino-3-(2-fluorophenyl)-2-methylpropanoic acid
  SITE 10: note = 3-(4-pyridyl)-L-alanine
  SITE 13: note = Alpha-methyl-L-leucine
  SITE 16: note = Ornithine
  SITE 17: note = Lysine is chemically modified through conjugation of the side chain with epsilon-Lysine-epsilon-Lysine-Gamma-Glutamic acid-CO-(CH2)16-CO2H
  SITE 20: note = 2-aminoisobutyric acid
  SITE 24: note = D-Glutamic acid
  SITE 25: note = Alpha-methyl-L-tyrosine
  SITE 40: note = Lysine amide is chemically modified through conjugation of the side chain with 24x Polyethylene glycol-(6S,16S)-6,16-bis(aminomethyl)-4,7,15,18-tetraoxo-11 -(4-oxobutanoyl)-5,8,11,14,17-pentaazahenicosanedioic acid-IgG4 Fc with charge balancing mutations (Q274K - CH2, E355R - CH3, E419Q- CH3) with N terminal Isoleucine-glycine (IG) dipeptide adjacent the C229 of the hinge (BEA-MalDap2-IG KRQ) which is attached to two Fc sequences

SEQ ID NO: 769 - protein, 55 aa, synthetic construct; identical to SEQ ID NO: 556
  SITE 2: note = 2-aminoisobutyric acid
  SITE 6: note = (S)-2-amino-3-(2-fluorophenyl)-2-methylpropanoic acid
  SITE 10: note = 3-(4-pyridyl)-L-alanine
  SITE 13: note = Alpha-methyl-L-leucine
  SITE 16: note = Ornithine
  SITE 17: note = Lysine is chemically modified through conjugation of the side chain with (2-[2-(2-amino-ethoxy)-ethoxy]-acetyl)2-Gamma-Glutamic acid-CO-(CH2)16-CO2H
  SITE 20: note = 2-aminoisobutyric acid
  SITE 25: note = Alpha-methyl-L-tyrosine
  SITE 55: note = Lysine amide is chemically modified through conjugation of the side chain with (6S,16S)-6,16-bis(aminomethyl)-4,7,15,18-tetraoxo-11-(4-oxo butanoyl)-5,8,11,14,17-pentaazahenicosanedioic acid-IgG4 Fc with charge balancing mutations (Q274K - CH2, E355R - CH3, E419Q- CH3) with N terminal Isoleucine-glycine (IG) dipeptide adjacent the C229 of the hinge (BEA-MalDap2-IG KRQ) which is attached to two Fc sequences

SEQ ID NO: 770 - protein, 40 aa, synthetic construct; identical to SEQ ID NO: 605
  SITE 2: note = 2-aminoisobutyric acid
  SITE 6: note = (S)-2-amino-3-(2-fluorophenyl)-2-methylpropanoic acid
  SITE 10: note = 3-(4-pyridyl)-L-alanine
  SITE 11: note = 2-aminoisobutyric acid
  SITE 13: note = Alpha-methyl-L-leucine
  SITE 16: note = Ornithine
  SITE 17: note = Lysine is chemically modified through conjugation of the side chain with (2-[2-(2-amino-ethoxy)-ethoxy]-acetyl)2-Gamma-Glutamic acid-CO-(CH2)16-CO2H
  SITE 20: note = 2-aminoisobutyric acid
  SITE 25: note = Alpha-methyl-L-tyrosine
  SITE 40: note = Lysine amide is chemically modified through conjugation of the side chain with 24x Polyethylene glycol-(6S,16S)-6,16-bis(aminomethyl)-4,7,15,18-tetraoxo-11 -(4-oxobutanoyl)-5,8,11,14,17-pentaazahenicosanedioic acid-IgG4 Fc with charge balancing mutations (Q274K - CH2, E355R - CH3, E419Q- CH3) with N terminal Isoleucine-glycine (IG) dipeptide adjacent the C229 of the hinge (BEA-MalDap2-IG KRQ) which is attached to two Fc sequences

SEQ ID NO: 771 - protein, 40 aa, synthetic construct; identical to SEQ ID NO: 605
  SITE 2: note = 2-aminoisobutyric acid
  SITE 6: note = (S)-2-amino-3-(2-fluorophenyl)-2-methylpropanoic acid
  SITE 10: note = 3-(4-pyridyl)-L-alanine
  SITE 11: note = 2-aminoisobutyric acid
  SITE 13: note = Alpha-methyl-L-leucine
  SITE 16: note = Ornithine
  SITE 17: note = Lysine is chemically modified through conjugation of the side chain with epsilon-Lysine-epsilon-Lysine-Gamma-Glutamic acid-CO-(CH2)16-CO2H
  SITE 20: note = 2-aminoisobutyric acid
  SITE 25: note = Alpha-methyl-L-tyrosine
  SITE 40: note = Lysine amide is chemically modified through conjugation of the side chain with 24x Polyethylene glycol-(6S,16S)-6,16-bis(aminomethyl)-4,7,15,18-tetraoxo-11 -(4-oxobutanoyl)-5,8,11,14,17-pentaazahenicosanedioic acid-IgG4 Fc with charge balancing mutations (Q274K - CH2, E355R - CH3, E419Q- CH3) with N terminal Isoleucine-glycine (IG) dipeptide adjacent the C229 of the hinge (BEA-MalDap2-IG KRQ) which is attached to two Fc sequences

SEQ ID NO: 772 - protein, 40 aa, synthetic construct; identical to SEQ ID NO: 591
  SITE 2: note = 2-aminoisobutyric acid
  SITE 6: note = (S)-2-amino-3-(2-fluorophenyl)-2-methylpropanoic acid
  SITE 10: note = 3-(4-pyridyl)-L-alanine
  SITE 11: note = 2-aminoisobutyric acid
  SITE 13: note = Alpha-methyl-L-leucine
  SITE 16: note = Ornithine
  SITE 17: note = Lysine is chemically modified through conjugation of the side chain with (2-[2-(2-amino-ethoxy)-ethoxy]-acetyl)2-Gamma-Glutamic acid-CO-(CH2)16-CO2H
  SITE 20: note = 2-aminoisobutyric acid
  SITE 25: note = Alpha-methyl-L-tyrosine
  SITE 40: note = Lysine amide is chemically modified through conjugation of the side chain with (2-[2-(2-amino-ethoxy)-ethoxy]-acetyl)6-(6S,16S)-6,16-bis(a minomethyl)-4,7,15,18-tetraoxo-11-(4-oxobutanoyl)-5,8,11,14 ,17-pentaazahenicosanedioic acid-IgG4 Fc with charge balancing mutations (Q274K - CH2, E355R - CH3, E419Q- CH3) with N terminal Isoleucine-glycine (IG) dipeptide adjacent the C229 of the hinge (BEA-MalDap2-IG KRQ) which is attached to two Fc sequences

SEQ ID NO: 773 - protein, 40 aa, synthetic construct; identical to SEQ ID NO: 625
  SITE 2: note = 2-aminoisobutyric acid
  SITE 6: note = (S)-2-amino-3-(2-fluorophenyl)-2-methylpropanoic acid
  SITE 10: note = 3-(4-pyridyl)-L-alanine
  SITE 13: note = Alpha-methyl-L-leucine
  SITE 16: note = Ornithine
  SITE 17: note = Lysine is chemically modified through conjugation of the side chain with (2-[2-(2-amino-ethoxy)-ethoxy]-acetyl)2-Gamma-Glutamic acid-CO-(CH2)16-CO2H
  SITE 20: note = 2-aminoisobutyric acid
  SITE 25: note = Alpha-methyl-L-tyrosine
  SITE 40: note = Lysine amide is chemically modified through conjugation of the side chain with 24x Polyethylene glycol-(6S,16S)-6,16-bis(aminomethyl)-4,7,15,18-tetraoxo-11 -(4-oxobutanoyl)-5,8,11,14,17-pentaazahenicosanedioic acid-IgG4 Fc with charge balancing mutations (Q274K - CH2, E355R - CH3, E419Q- CH3) with N terminal Isoleucine-glycine (IG) dipeptide adjacent the C229 of the hinge (BEA-MalDap2-IG KRQ) which is attached to two Fc sequences

SEQ ID NO: 774 - protein, 40 aa, synthetic construct; identical to SEQ ID NO: 628
  SITE 2: note = 2-aminoisobutyric acid
  SITE 6: note = (S)-2-amino-3-(2-fluorophenyl)-2-methylpropanoic acid
  SITE 11: note = 2-aminoisobutyric acid
  SITE 13: note = Alpha-methyl-L-leucine
  SITE 16: note = Ornithine
  SITE 17: note = Lysine is chemically modified through conjugation of the side chain with (2-[2-(2-amino-ethoxy)-ethoxy]-acetyl)2-Gamma-Glutamic acid-CO-(CH2)16-CO2H
  SITE 20: note = 2-aminoisobutyric acid
  SITE 24: note = D-Glutamic acid
  SITE 25: note = Alpha-methyl-L-tyrosine
  SITE 40: note = Lysine amide is chemically modified through conjugation of the side chain with 24x Polyethylene glycol-(6S,16S)-6,16-bis(aminomethyl)-4,7,15,18-tetraoxo-11 -(4-oxobutanoyl)-5,8,11,14,17-pentaazahenicosanedioic acid-IgG4 Fc with charge balancing mutations (Q274K - CH2, E355R - CH3, E419Q- CH3) with N terminal Isoleucine-glycine (IG) dipeptide adjacent the C229 of the hinge (BEA-MalDap2-IG KRQ) which is attached to two Fc sequences

SEQ ID NO: 775 - protein, 40 aa, synthetic construct; identical to SEQ ID NO: 628
  SITE 2: note = 2-aminoisobutyric acid
  SITE 6: note = (S)-2-amino-3-(2-fluorophenyl)-2-methylpropanoic acid
  SITE 11: note = 2-aminoisobutyric acid
  SITE 13: note = Alpha-methyl-L-leucine
  SITE 16: note = Ornithine
  SITE 17: note = Lysine is chemically modified through conjugation of the side chain with (2-[2-(2-amino-ethoxy)-ethoxy]-acetyl)2-Gamma-Glutamic acid-CO-(CH2)16-CO2H
  SITE 20: note = 2-aminoisobutyric acid
  SITE 25: note = Alpha-methyl-L-tyrosine
  SITE 40: note = Lysine amide is chemically modified through conjugation of the side chain with 24x Polyethylene glycol-(6S,16S)-6,16-bis(aminomethyl)-4,7,15,18-tetraoxo-11 -(4-oxobutanoyl)-5,8,11,14,17-pentaazahenicosanedioic acid-IgG4 Fc with charge balancing mutations (Q274K - CH2, E355R - CH3, E419Q- CH3) with N terminal Isoleucine-glycine (IG) dipeptide adjacent the C229 of the hinge (BEA-MalDap2-IG KRQ) which is attached to two Fc sequences

SEQ ID NO: 776 - protein, 40 aa, synthetic construct
  SITE 2: note = 2-aminoisobutyric acid
  SITE 6: note = (S)-2-amino-3-(2-fluorophenyl)-2-methylpropanoic acid
  SITE 10: note = 3-(4-pyridyl)-L-alanine
  SITE 11: note = 2-aminoisobutyric acid
  SITE 13: note = Alpha-methyl-L-leucine
  SITE 16: note = Ornithine
  SITE 17: note = Lysine is chemically modified through conjugation of the side chain with (2-[2-(2-amino-ethoxy)-ethoxy]-acetyl)2-Gamma-Glutamic acid-CO-(CH2)16-CO2H
  SITE 20: note = 2-aminoisobutyric acid
  SITE 25: note = Alpha-methyl-L-tyrosine
  SITE 29: note = 2-aminoisobutyric acid
  SITE 40: note = Lysine amide is chemically modified through conjugation of the side chain with 24x Polyethylene glycol-(6S,16S)-6,16-bis(aminomethyl)-4,7,15,18-tetraoxo-11 -(4-oxobutanoyl)-5,8,11,14,17-pentaazahenicosanedioic acid-IgG4 Fc with charge balancing mutations (Q274K - CH2, E355R - CH3, E419Q- CH3) with N terminal Isoleucine-glycine (IG) dipeptide adjacent the C229 of the hinge (BEA-MalDap2-IG KRQ) which is attached to two Fc sequences
YXEGTXTSDXXIXLDXKAQXEFIQXLIEXSPSSGAPPPSK

SEQ ID NO: 777 - protein, 40 aa, synthetic construct; identical to SEQ ID NO: 776
  SITE 2: note = 2-aminoisobutyric acid
  SITE 6: note = (S)-2-amino-3-(2-fluorophenyl)-2-methylpropanoic acid
  SITE 10: note = 3-(4-pyridyl)-L-alanine
  SITE 11: note = 2-aminoisobutyric acid
  SITE 13: note = Alpha-methyl-L-leucine
  SITE 16: note = Ornithine
  SITE 17: note = Lysine is chemically modified through conjugation of the side chain with epsilon-Lysine-epsilon-Lysine-Gamma-Glutamic acid-CO-(CH2)16-CO2H
  SITE 20: note = 2-aminoisobutyric acid
  SITE 25: note = Alpha-methyl-L-tyrosine
  SITE 29: note = 2-aminoisobutyric acid
  SITE 40: note = Lysine amide is chemically modified through conjugation of the side chain with 24x Polyethylene glycol-(6S,16S)-6,16-bis(aminomethyl)-4,7,15,18-tetraoxo-11 -(4-oxobutanoyl)-5,8,11,14,17-pentaazahenicosanedioic acid-IgG4 Fc with charge balancing mutations (Q274K - CH2, E355R - CH3, E419Q- CH3) with N terminal Isoleucine-glycine (IG) dipeptide adjacent the C229 of the hinge (BEA-MalDap2-IG KRQ) which is attached to two Fc sequences

SEQ ID NO: 778 - protein, 40 aa, synthetic construct; identical to SEQ ID NO: 625
  SITE 2: note = 2-aminoisobutyric acid
  SITE 6: note = (S)-2-amino-3-(2-fluorophenyl)-2-methylpropanoic acid
  SITE 10: note = 3-(4-pyridyl)-L-alanine
  SITE 13: note = Alpha-methyl-L-leucine
  SITE 16: note = Ornithine
  SITE 17: note = Lysine is chemically modified through conjugation of the side chain with (2-[2-(2-amino-ethoxy)-ethoxy]-acetyl)2-Gamma-Glutamic acid-CO-(CH2)16-CO2H
  SITE 20: note = 2-aminoisobutyric acid
  SITE 25: note = Alpha-methyl-L-tyrosine
  SITE 40: note = Lysine amide is chemically modified through conjugation of the side chain with (2-[2-(2-amino-ethoxy)-ethoxy]-acetyl)6-GPAPAPAPAPAPA-(6S,1 6S)-6,16-bis(aminomethyl)-4,7,15,18-tetraoxo-11-(4-oxobutan oyl)-5,8,11,14,17-pentaazahenicosanedioic acid-IgG4 Fc with charge balancing mutations (Q274K - CH2, E355R - CH3, E419Q- CH3) with N terminal Isoleucine-glycine (IG) dipeptide adjacent the C229 of the hinge (BEA-MalDap2-IG KRQ) which is attached to two Fc sequences

SEQ ID NO: 779 - protein, 40 aa, synthetic construct; identical to SEQ ID NO: 625
  SITE 2: note = 2-aminoisobutyric acid
  SITE 6: note = (S)-2-amino-3-(2-fluorophenyl)-2-methylpropanoic acid
  SITE 10: note = 3-(4-pyridyl)-L-alanine
  SITE 13: note = Alpha-methyl-L-leucine
  SITE 16: note = Ornithine
  SITE 17: note = Lysine is chemically modified through conjugation of the side chain with epsilon-Lysine-epsilon-Lysine-Gamma-Glutamic acid-CO-(CH2)16-CO2H
  SITE 20: note = 2-aminoisobutyric acid
  SITE 25: note = Alpha-methyl-L-tyrosine
  SITE 40: note = Lysine amide is chemically modified through conjugation of the side chain with (2-[2-(2-amino-ethoxy)-ethoxy]-acetyl)6-GPAPAPAPAPAPA-(6S,1 6S)-6,16-bis(aminomethyl)-4,7,15,18-tetraoxo-11-(4-oxobutan oyl)-5,8,11,14,17-pentaazahenicosanedioic acid-IgG4 Fc with charge balancing mutations (Q274K - CH2, E355R - CH3, E419Q- CH3) with N terminal Isoleucine-glycine (IG) dipeptide adjacent the C229 of the hinge (BEA-MalDap2-IG KRQ) which is attached to two Fc sequences

SEQ ID NO: 780 - protein, 40 aa, synthetic construct; identical to SEQ ID NO: 625
  SITE 2: note = 2-aminoisobutyric acid
  SITE 6: note = (S)-2-amino-3-(2-fluorophenyl)-2-methylpropanoic acid
  SITE 10: note = 3-(4-pyridyl)-L-alanine
  SITE 13: note = Alpha-methyl-L-leucine
  SITE 16: note = Ornithine
  SITE 17: note = Lysine is chemically modified through conjugation of the side chain with (2-[2-(2-amino-ethoxy)-ethoxy]-acetyl)2-Gamma-Glutamic acid-CO-(CH2)16-CO2H
  SITE 20: note = 2-aminoisobutyric acid
  SITE 25: note = Alpha-methyl-L-tyrosine
  SITE 40: note = Lysine amide is chemically modified through conjugation of the side chain with 24x Polyethylene glycol-(6S,16S)-6,16-bis(aminomethyl)-4,7,15,18-tetraoxo-11 -(4-oxobutanoyl)-5,8,11,14,17-pentaazahenicosanedioic acid-IgG4 Fc with charge balancing mutations (Q274K - CH2, E355R - CH3, E419Q- CH3) with N terminal Isoleucine-glycine (IG) dipeptide adjacent the C229 of the hinge (BEA-MalDap2-IG KRQ) which is attached to two Fc sequences

SEQ ID NO: 781 - protein, 40 aa, synthetic construct; identical to SEQ ID NO: 625
  SITE 2: note = 2-aminoisobutyric acid
  SITE 6: note = (S)-2-amino-3-(2-fluorophenyl)-2-methylpropanoic acid
  SITE 10: note = 3-(4-pyridyl)-L-alanine
  SITE 13: note = Alpha-methyl-L-leucine
  SITE 16: note = Ornithine
  SITE 17: note = Lysine is chemically modified through conjugation of the side chain with epsilon-Lysine-epsilon-Lysine-Gamma-Glutamic acid-CO-(CH2)16-CO2H
  SITE 20: note = 2-aminoisobutyric acid
  SITE 25: note = Alpha-methyl-L-tyrosine
  SITE 40: note = Lysine amide is chemically modified through conjugation of the side chain with 24x Polyethylene glycol-(6S,16S)-6,16-bis(aminomethyl)-4,7,15,18-tetraoxo-11 -(4-oxobutanoyl)-5,8,11,14,17-pentaazahenicosanedioic acid-IgG4 Fc with charge balancing mutations (Q274K - CH2, E355R - CH3, E419Q- CH3) with N terminal Isoleucine-glycine (IG) dipeptide adjacent the C229 of the hinge (BEA-MalDap2-IG KRQ) which is attached to two Fc sequences

SEQ ID NO: 782 - protein, 40 aa, synthetic construct; identical to SEQ ID NO: 625
  SITE 2: note = 2-aminoisobutyric acid
  SITE 6: note = (S)-2-amino-3-(2-fluorophenyl)-2-methylpropanoic acid
  SITE 10: note = 3-(4-pyridyl)-L-alanine
  SITE 13: note = Alpha-methyl-L-leucine
  SITE 16: note = Ornithine
  SITE 17: note = Lysine is chemically modified through conjugation of the side chain with (2-[2-(2-amino-ethoxy)-ethoxy]-acetyl)2-Gamma-Glutamic acid-CO-(CH2)16-CO2H
  SITE 20: note = 2-aminoisobutyric acid
  SITE 25: note = Alpha-methyl-L-tyrosine
  SITE 40: note = Lysine amide is chemically modified through conjugation of the side chain with (2-[2-(2-amino-ethoxy)-ethoxy]-acetyl)6-(6S,16S)-6,16-bis(a minomethyl)-4,7,15,18-tetraoxo-11-(4-oxobutanoyl)-5,8,11,14 ,17-pentaazahenicosanedioic acid-IgG4 Fc with charge balancing mutations (Q274K - CH2, E355R - CH3, E419Q- CH3) with N terminal Isoleucine-glycine (IG) dipeptide adjacent the C229 of the hinge (BEA-MalDap2-IG KRQ) which is attached to two Fc sequences

SEQ ID NO: 783 - protein, 40 aa, synthetic construct; identical to SEQ ID NO: 625
  SITE 2: note = 2-aminoisobutyric acid
  SITE 6: note = (S)-2-amino-3-(2-fluorophenyl)-2-methylpropanoic acid
  SITE 10: note = 3-(4-pyridyl)-L-alanine
  SITE 13: note = Alpha-methyl-L-leucine
  SITE 16: note = Ornithine
  SITE 17: note = Lysine is chemically modified through conjugation of the side chain with epsilon-Lysine-epsilon-Lysine-Gamma-Glutamic acid-CO-(CH2)16-CO2H
  SITE 20: note = 2-aminoisobutyric acid
  SITE 25: note = Alpha-methyl-L-tyrosine
  SITE 40: note = Lysine amide is chemically modified through conjugation of the side chain with (2-[2-(2-amino-ethoxy)-ethoxy]-acetyl)6-(6S,16S)-6,16-bis(a minomethyl)-4,7,15,18-tetraoxo-11-(4-oxobutanoyl)-5,8,11,14 ,17-pentaazahenicosanedioic acid-IgG4 Fc with charge balancing mutations (Q274K - CH2, E355R - CH3, E419Q- CH3) with N terminal Isoleucine-glycine (IG) dipeptide adjacent the C229 of the hinge (BEA-MalDap2-IG KRQ) which is attached to two Fc sequences

SEQ ID NO: 784 - protein, 40 aa, synthetic construct; identical to SEQ ID NO: 460
  SITE 2: note = 2-aminoisobutyric acid
  SITE 6: note = (S)-2-amino-3-(2-fluorophenyl)-2-methylpropanoic acid
  SITE 10: note = 3-(4-pyridyl)-L-alanine
  SITE 13: note = Alpha-methyl-L-leucine
  SITE 16: note = Ornithine
  SITE 17: note = Lysine is chemically modified through conjugation of the side chain with epsilon-Lysine-epsilon-Lysine-Gamma-Glutamic acid-CO-(CH2)16-CO2H
  SITE 20: note = 2-aminoisobutyric acid
  SITE 24: note = D-Glutamic acid
  SITE 25: note = Alpha-methyl-L-tyrosine
  SITE 40: note = Lysine amide is chemically modified through conjugation of the side chain with 24x Polyethylene glycol-(6S,16S)-6,16-bis(aminomethyl)-4,7,15,18-tetraoxo-11 -(4-oxobutanoyl)-5,8,11,14,17-pentaazahenicosanedioic acid-IgG4 Fc with N terminus starting with the Cysteine 229 of the hinge (BEA-MalDap2-N-Cys) which is attached to two Fc sequences

SEQ ID NO: 785 - protein, 40 aa, synthetic construct; identical to SEQ ID NO: 460
  SITE 2: note = 2-aminoisobutyric acid
  SITE 6: note = (S)-2-amino-3-(2-fluorophenyl)-2-methylpropanoic acid
  SITE 10: note = 3-(4-pyridyl)-L-alanine
  SITE 13: note = Alpha-methyl-L-leucine
  SITE 16: note = Ornithine
  SITE 17: note = Lysine is chemically modified through conjugation of the side chain with epsilon-Lysine-epsilon-Lysine-Gamma-Glutamic acid-CO-(CH2)16-CO2H
  SITE 20: note = 2-aminoisobutyric acid
  SITE 24: note = D-Glutamic acid
  SITE 25: note = Alpha-methyl-L-tyrosine
  SITE 40: note = Lysine amide is chemically modified through conjugation of the side chain with 24x Polyethylene glycol-(6S,16S)-6,16-bis(aminomethyl)-4,7,15,18-tetraoxo-11 -(4-oxobutanoyl)-5,8,11,14,17-pentaazahenicosanedioic acid-IgG4 Fc with N terminus starting with the Cysteine 229 of the hinge with charge balancing mutations (Q274K - CH2, E355R - CH3, E419Q- CH3) (BEA-MalDap2-N-Cys KRQ) which is attached to two Fc sequences

SEQ ID NO: 786 - protein, 55 aa, synthetic construct; identical to SEQ ID NO: 555
  SITE 2: note = 2-aminoisobutyric acid
  SITE 6: note = (S)-2-amino-3-(2-fluorophenyl)-2-methylpropanoic acid
  SITE 10: note = 3-(4-pyridyl)-L-alanine
  SITE 11: note = 2-aminoisobutyric acid
  SITE 13: note = Alpha-methyl-L-leucine
  SITE 16: note = Ornithine
  SITE 17: note = Lysine is chemically modified through conjugation of the side chain with (2-[2-(2-amino-ethoxy)-ethoxy]-acetyl)2-Gamma-Glutamic acid-CO-(CH2)16-CO2H
  SITE 20: note = 2-aminoisobutyric acid
  SITE 24: note = D-Glutamic acid
  SITE 25: note = Alpha-methyl-L-tyrosine
  SITE 55: note = Lysine amide is chemically modified through conjugation of the side chain with (6S,16S)-6,16-bis(aminomethyl)-4,7,15,18-tetraoxo-11-(4-oxo butanoyl)-5,8,11,14,17-pentaazahenicosanedioic acid-IgG4 Fc with charge balancing mutations (Q274K - CH2, E355R - CH3, E419Q- CH3) (BEA-MalDap2-KRQ) which is attached to two Fc sequences

SEQ ID NO: 787 - protein, 40 aa, synthetic construct; identical to SEQ ID NO: 460
  SITE 2: note = 2-aminoisobutyric acid
  SITE 6: note = (S)-2-amino-3-(2-fluorophenyl)-2-methylpropanoic acid
  SITE 10: note = 3-(4-pyridyl)-L-alanine
  SITE 13: note = Alpha-methyl-L-leucine
  SITE 16: note = Ornithine
  SITE 17: note = Lysine is chemically modified through conjugation of the side chain with epsilon-Lysine-epsilon-Lysine-Gamma-Glutamic acid-CO-(CH2)16-CO2H
  SITE 20: note = 2-aminoisobutyric acid
  SITE 24: note = D-Glutamic acid
  SITE 25: note = Alpha-methyl-L-tyrosine
  SITE 40: note = Lysine amide is chemically modified through conjugation of the side chain with 24x Polyethylene glycol-(6S,16S)-6,16-bis(aminomethyl)-4,7,15,18-tetraoxo-11 -(4-oxobutanoyl)-5,8,11,14,17-pentaazahenicosanedioic acid-IgG4 Fc with charge balancing mutations (Q274K - CH2, E355R - CH3, E419Q- CH3) (BEA-MalDap2-KRQ) which is attached to two Fc sequences

SEQ ID NO: 788 - protein, 40 aa, synthetic construct
  SITE 2: note = 2-aminoisobutyric acid
  SITE 6: note = (S)-2-amino-3-(2-fluorophenyl)-2-methylpropanoic acid
  SITE 10: note = 3-(4-pyridyl)-L-alanine
  SITE 13: note = Alpha-methyl-L-leucine
  SITE 16: note = Ornithine
  SITE 17: note = Lysine is chemically modified through conjugation of the side chain with (2-[2-(2-amino-ethoxy)-ethoxy]-acetyl)2-Gamma-Glutamic acid-CO-(CH2)16-CO2H
  SITE 20: note = Alpha-methyl-L-3-(4-pyridyl)-L-alanine
  SITE 21: note = Ornithine
  SITE 24: note = D-Glutamic acid
  SITE 25: note = Alpha-methyl-L-tyrosine
  SITE 40: note = Lysine amide is chemically modified through conjugation of the side chain with 24x Polyethylene glycol-(6S,16S)-6,16-bis(aminomethyl)-4,7,15,18-tetraoxo-11 -(4-oxobutanoyl)-5,8,11,14,17-pentaazahenicosanedioic acid (BEA-MalDap2) which is attached to two Fc sequences
YXQGTXTSDXSIXLDXKAQXXFIEXLIEGSPSSGAPPPSK

SEQ ID NO: 789 - protein, 40 aa, synthetic construct; identical to SEQ ID NO: 788
  SITE 2: note = 2-aminoisobutyric acid
  SITE 6: note = (S)-2-amino-3-(2-fluorophenyl)-2-methylpropanoic acid
  SITE 10: note = 3-(4-pyridyl)-L-alanine
  SITE 13: note = Alpha-methyl-L-leucine
  SITE 16: note = Ornithine
  SITE 17: note = Lysine is chemically modified through conjugation of the side chain with (2-[2-(2-amino-ethoxy)-ethoxy]-acetyl)2-Gamma-Glutamic acid-CO-(CH2)16-CO2H
  SITE 20: note = Alpha-methyl-L-3-(4-pyridyl)-L-alanine
  SITE 21: note = Ornithine
  SITE 25: note = Alpha-methyl-L-tyrosine
  SITE 40: note = Lysine amide is chemically modified through conjugation of the side chain with 24x Polyethylene glycol-(6S,16S)-6,16-bis(aminomethyl)-4,7,15,18-tetraoxo-11 -(4-oxobutanoyl)-5,8,11,14,17-pentaazahenicosanedioic acid (BEA-MalDap2) which is attached to two Fc sequences

SEQ ID NO: 790 - protein, 40 aa, synthetic construct
  SITE 2: note = 2-aminoisobutyric acid
  SITE 6: note = (S)-2-amino-3-(2-fluorophenyl)-2-methylpropanoic acid
  SITE 10: note = 3-(4-pyridyl)-L-alanine
  SITE 11: note = Alpha-methyl-L-serine
  SITE 13: note = Alpha-methyl-L-leucine
  SITE 16: note = Ornithine
  SITE 17: note = Lysine is chemically modified through conjugation of the side chain with (2-[2-(2-amino-ethoxy)-ethoxy]-acetyl)2-Gamma-Glutamic acid-CO-(CH2)16-CO2H
  SITE 20: note = Alpha-methyl-L-3-(4-pyridyl)-L-alanine
  SITE 21: note = Ornithine
  SITE 24: note = D-Glutamic acid
  SITE 25: note = Alpha-methyl-L-tyrosine
  SITE 40: note = Lysine amide is chemically modified through conjugation of the side chain with 24x Polyethylene glycol-(6S,16S)-6,16-bis(aminomethyl)-4,7,15,18-tetraoxo-11 -(4-oxobutanoyl)-5,8,11,14,17-pentaazahenicosanedioic acid (BEA-MalDap2) which is attached to two Fc sequences
YXQGTXTSDXXIXLDXKAQXXFIEXLIEGSPSSGAPPPSK

SEQ ID NO: 791 - protein, 40 aa, synthetic construct; identical to SEQ ID NO: 790
  SITE 2: note = 2-aminoisobutyric acid
  SITE 6: note = (S)-2-amino-3-(2-fluorophenyl)-2-methylpropanoic acid
  SITE 10: note = 3-(4-pyridyl)-L-alanine
  SITE 11: note = Alpha-methyl-L-serine
  SITE 13: note = Alpha-methyl-L-leucine
  SITE 16: note = Ornithine
  SITE 17: note = Lysine is chemically modified through conjugation of the side chain with (2-[2-(2-amino-ethoxy)-ethoxy]-acetyl)2-Gamma-Glutamic acid-CO-(CH2)16-CO2H
  SITE 20: note = Alpha-methyl-L-3-(4-pyridyl)-L-alanine
  SITE 21: note = Ornithine
  SITE 25: note = Alpha-methyl-L-tyrosine
  SITE 40: note = Lysine amide is chemically modified through conjugation of the side chain with 24x Polyethylene glycol-(6S,16S)-6,16-bis(aminomethyl)-4,7,15,18-tetraoxo-11 -(4-oxobutanoyl)-5,8,11,14,17-pentaazahenicosanedioic acid (BEA-MalDap2) which is attached to two Fc sequences

SEQ ID NO: 792 - protein, 40 aa, synthetic construct
  SITE 2: note = 2-aminoisobutyric acid
  SITE 6: note = (S)-2-amino-3-(2-fluorophenyl)-2-methylpropanoic acid
  SITE 11: note = Alpha-methyl-L-serine
  SITE 13: note = Alpha-methyl-L-leucine
  SITE 16: note = Ornithine
  SITE 17: note = Lysine is chemically modified through conjugation of the side chain with (2-[2-(2-amino-ethoxy)-ethoxy]-acetyl)2-Gamma-Glutamic acid-CO-(CH2)16-CO2H
  SITE 20: note = Alpha-methyl-L-3-(4-pyridyl)-L-alanine
  SITE 21: note = Ornithine
  SITE 24: note = D-Glutamic acid
  SITE 25: note = Alpha-methyl-L-tyrosine
  SITE 40: note = Lysine amide is chemically modified through conjugation of the side chain with 24x Polyethylene glycol-(6S,16S)-6,16-bis(aminomethyl)-4,7,15,18-tetraoxo-11 -(4-oxobutanoyl)-5,8,11,14,17-pentaazahenicosanedioic acid (BEA-MalDap2) which is attached to two Fc sequences
YXQGTXTSDYXIXLDXKAQXXFIEXLIEGSPSSGAPPPSK

SEQ ID NO: 793 - protein, 40 aa, synthetic construct; identical to SEQ ID NO: 792
  SITE 2: note = 2-aminoisobutyric acid
  SITE 6: note = (S)-2-amino-3-(2-fluorophenyl)-2-methylpropanoic acid
  SITE 11: note = Alpha-methyl-L-serine
  SITE 13: note = Alpha-methyl-L-leucine
  SITE 16: note = Ornithine
  SITE 17: note = Lysine is chemically modified through conjugation of the side chain with (2-[2-(2-amino-ethoxy)-ethoxy]-acetyl)2-Gamma-Glutamic acid-CO-(CH2)16-CO2H
  SITE 20: note = Alpha-methyl-L-3-(4-pyridyl)-L-alanine
  SITE 21: note = Ornithine
  SITE 25: note = Alpha-methyl-L-tyrosine
  SITE 40: note = Lysine amide is chemically modified through conjugation of the side chain with 24x Polyethylene glycol-(6S,16S)-6,16-bis(aminomethyl)-4,7,15,18-tetraoxo-11 -(4-oxobutanoyl)-5,8,11,14,17-pentaazahenicosanedioic acid (BEA-MalDap2) which is attached to two Fc sequences

SEQ ID NO: 794 - protein, 55 aa, synthetic construct
  SITE 2: note = 2-aminoisobutyric acid
  SITE 6: note = (S)-2-amino-3-(2-fluorophenyl)-2-methylpropanoic acid
  SITE 10: note = 3-(4-pyridyl)-L-alanine
  SITE 11: note = Alpha-methyl-L-serine
  SITE 13: note = Alpha-methyl-L-leucine
  SITE 16: note = Ornithine
  SITE 17: note = Lysine is chemically modified through conjugation of the side chain with (2-[2-(2-amino-ethoxy)-ethoxy]-acetyl)2-Gamma-Glutamic acid-CO-(CH2)16-CO2H
  SITE 20: note = Alpha-methyl-L-3-(4-pyridyl)-L-alanine
  SITE 21: note = Ornithine
  SITE 25: note = Alpha-methyl-L-tyrosine
  SITE 55: note = Lysine amide is chemically modified through conjugation of the side chain with (6S,16S)-6,16-bis(aminomethyl)-4,7,15,18-tetraoxo-11-(4-oxo butanoyl)-5,8,11,14,17-pentaazahenicosanedioic acid (BEA-MalDap2) which is attached to two Fc sequences
YXQGTXTSDXXIXLDXKAQXXFIEXLIEGGGGGGGSGGGGSGAPAPAPAPAPAPK

SEQ ID NO: 795 - protein, 55 aa, synthetic construct
  SITE 2: note = 2-aminoisobutyric acid
  SITE 6: note = (S)-2-amino-3-(2-fluorophenyl)-2-methylpropanoic acid
  SITE 11: note = Alpha-methyl-L-serine
  SITE 13: note = Alpha-methyl-L-leucine
  SITE 16: note = Ornithine
  SITE 17: note = Lysine is chemically modified through conjugation of the side chain with (2-[2-(2-amino-ethoxy)-ethoxy]-acetyl)2-Gamma-Glutamic acid-CO-(CH2)16-CO2H
  SITE 20: note = Alpha-methyl-L-3-(4-pyridyl)-L-alanine
  SITE 21: note = Ornithine
  SITE 24: note = D-Glutamic acid
  SITE 25: note = Alpha-methyl-L-tyrosine
  SITE 55: note = Lysine amide is chemically modified through conjugation of the side chain with (6S,16S)-6,16-bis(aminomethyl)-4,7,15,18-tetraoxo-11-(4-oxo butanoyl)-5,8,11,14,17-pentaazahenicosanedioic acid (BEA-MalDap2) which is attached to two Fc sequences
YXQGTXTSDYXIXLDXKAQXXFIEXLIEGGGGGGGSGGGGSGAPAPAPAPAPAPK

SEQ ID NO: 796 - protein, 41 aa, synthetic construct
  SITE 2: note = 2-aminoisobutyric acid
  SITE 6: note = (S)-2-amino-3-(2-fluorophenyl)-2-methylpropanoic acid
  SITE 10: note = 3-(4-pyridyl)-L-alanine
  SITE 11: note = Alpha-methyl-L-serine
  SITE 13: note = Alpha-methyl-L-leucine
  SITE 16: note = Ornithine
  SITE 17: note = Lysine is chemically modified through conjugation of the side chain with (2-[2-(2-amino-ethoxy)-ethoxy]-acetyl)2-Gamma-Glutamic acid-CO-(CH2)16-CO2H
  SITE 20: note = Alpha-methyl-L-3-(4-pyridyl)-L-alanine
  SITE 21: note = Ornithine
  SITE 25: note = Alpha-methyl-L-tyrosine
  SITE 41: note = Lysine amide is chemically modified through conjugation of the side chain with 24x Polyethylene glycol-(6S,16S)-6,16-bis(aminomethyl)-4,7,15,18-tetraoxo-11 -(4-oxobutanoyl)-5,8,11,14,17-pentaazahenicosanedioic acid (BEA-MalDap2) which is attached to two Fc sequences
YXQGTXTSDXXIXLDXKAQXXFIEXLIEGGPSSGAPPPSGK

SEQ ID NO: 797 - protein, 41 aa, synthetic construct
  SITE 2: note = 2-aminoisobutyric acid
  SITE 6: note = (S)-2-amino-3-(2-fluorophenyl)-2-methylpropanoic acid
  SITE 11: note = Alpha-methyl-L-serine
  SITE 13: note = Alpha-methyl-L-leucine
  SITE 16: note = Ornithine
  SITE 17: note = Lysine is chemically modified through conjugation of the side chain with (2-[2-(2-amino-ethoxy)-ethoxy]-acetyl)2-Gamma-Glutamic acid-CO-(CH2)16-CO2H
  SITE 20: note = Alpha-methyl-L-3-(4-pyridyl)-L-alanine
  SITE 21: note = Ornithine
  SITE 24: note = D-Glutamic acid
  SITE 25: note = Alpha-methyl-L-tyrosine
  SITE 41: note = Lysine amide is chemically modified through conjugation of the side chain with 24x Polyethylene glycol-(6S,16S)-6,16-bis(aminomethyl)-4,7,15,18-tetraoxo-11 -(4-oxobutanoyl)-5,8,11,14,17-pentaazahenicosanedioic acid (BEA-MalDap2) which is attached to two Fc sequences
YXQGTXTSDYXIXLDXKAQXXFIEXLIEGGPSSGAPPPSGK

SEQ ID NO: 798 - protein, 41 aa, synthetic construct; identical to SEQ ID NO: 796
  SITE 2: note = 2-aminoisobutyric acid
  SITE 6: note = (S)-2-amino-3-(2-fluorophenyl)-2-methylpropanoic acid
  SITE 10: note = 3-(4-pyridyl)-L-alanine
  SITE 11: note = Alpha-methyl-L-serine
  SITE 13: note = Alpha-methyl-L-leucine
  SITE 16: note = Ornithine
  SITE 17: note = Lysine is chemically modified through conjugation of the side chain with epsilon-Lysine-epsilon-Lysine-Gamma-Glutamic acid-CO-(CH2)16-CO2H
  SITE 20: note = Alpha-methyl-L-3-(4-pyridyl)-L-alanine
  SITE 21: note = Ornithine
  SITE 25: note = Alpha-methyl-L-tyrosine
  SITE 41: note = Lysine amide is chemically modified through conjugation of the side chain with 24x Polyethylene glycol-(6S,16S)-6,16-bis(aminomethyl)-4,7,15,18-tetraoxo-11 -(4-oxobutanoyl)-5,8,11,14,17-pentaazahenicosanedioic acid (BEA-MalDap2) which is attached to two Fc sequences

SEQ ID NO: 799 - protein, 41 aa, synthetic construct; identical to SEQ ID NO: 797
  SITE 2: note = 2-aminoisobutyric acid
  SITE 6: note = (S)-2-amino-3-(2-fluorophenyl)-2-methylpropanoic acid
  SITE 11: note = Alpha-methyl-L-serine
  SITE 13: note = Alpha-methyl-L-leucine
  SITE 16: note = Ornithine
  SITE 17: note = Lysine is chemically modified through conjugation of the side chain with epsilon-Lysine-epsilon-Lysine-Gamma-Glutamic acid-CO-(CH2)16-CO2H
  SITE 20: note = Alpha-methyl-L-3-(4-pyridyl)-L-alanine
  SITE 21: note = Ornithine
  SITE 24: note = D-Glutamic acid
  SITE 25: note = Alpha-methyl-L-tyrosine
  SITE 41: note = Lysine amide is chemically modified through conjugation of the side chain with 24x Polyethylene glycol-(6S,16S)-6,16-bis(aminomethyl)-4,7,15,18-tetraoxo-11 -(4-oxobutanoyl)-5,8,11,14,17-pentaazahenicosanedioic acid (BEA-MalDap2) which is attached to two Fc sequences

SEQ ID NO: 800 - protein, 41 aa, synthetic construct; identical to SEQ ID NO: 103
  SITE 2: note = 2-aminoisobutyric acid
  SITE 6: note = (S)-2-amino-3-(2-fluorophenyl)-2-methylpropanoic acid
  SITE 10: note = 3-(4-pyridyl)-L-alanine
  SITE 11: note = Alpha-methyl-L-serine
  SITE 13: note = Alpha-methyl-L-leucine
  SITE 16: note = Ornithine
  SITE 17: note = Lysine is chemically modified through conjugation of the side chain with (2-[2-(2-amino-ethoxy)-ethoxy]-acetyl)2-Gamma-Glutamic acid-CO-(CH2)16-CO2H
  SITE 20: note = Alpha-methyl-L-3-(4-pyridyl)-L-alanine
  SITE 21: note = Ornithine
  SITE 24: note = Lysine is chemically modified through conjugation of the side chain with 24x Polyethylene glycol-(6S,16S)-6,16-bis(aminomethyl)-4,7,15,18-tetraoxo-11 -(4-oxobutanoyl)-5,8,11,14,17-pentaazahenicosanedioic acid (BEA-MalDap2) which is attached to two Fc sequences
  SITE 25: note = Alpha-methyl-L-tyrosine
  SITE 41: note = Amidated Glycine

SEQ ID NO: 801 - protein, 41 aa, synthetic construct; identical to SEQ ID NO: 104
  SITE 2: note = 2-aminoisobutyric acid
  SITE 6: note = (S)-2-amino-3-(2-fluorophenyl)-2-methylpropanoic acid
  SITE 11: note = Alpha-methyl-L-serine
  SITE 13: note = Alpha-methyl-L-leucine
  SITE 16: note = Ornithine
  SITE 17: note = Lysine is chemically modified through conjugation of the side chain with (2-[2-(2-amino-ethoxy)-ethoxy]-acetyl)2-Gamma-Glutamic acid-CO-(CH2)16-CO2H
  SITE 20: note = Alpha-methyl-L-3-(4-pyridyl)-L-alanine
  SITE 21: note = Ornithine
  SITE 24: note = Lysine is chemically modified through conjugation of the side chain with 24x Polyethylene glycol-(6S,16S)-6,16-bis(aminomethyl)-4,7,15,18-tetraoxo-11 -(4-oxobutanoyl)-5,8,11,14,17-pentaazahenicosanedioic acid (BEA-MalDap2) which is attached to two Fc sequences
  SITE 25: note = Alpha-methyl-L-tyrosine
  SITE 41: note = Amidated Glycine

SEQ ID NO: 802 - protein, 41 aa, synthetic construct; identical to SEQ ID NO: 103
  SITE 2: note = 2-aminoisobutyric acid
  SITE 6: note = (S)-2-amino-3-(2-fluorophenyl)-2-methylpropanoic acid
  SITE 10: note = 3-(4-pyridyl)-L-alanine
  SITE 11: note = Alpha-methyl-L-serine
  SITE 13: note = Alpha-methyl-L-leucine
  SITE 16: note = Ornithine
  SITE 17: note = Lysine is chemically modified through conjugation of the side chain with epsilon-Lysine-epsilon-Lysine-Gamma-Glutamic acid-CO-(CH2)16-CO2H
  SITE 20: note = Alpha-methyl-L-3-(4-pyridyl)-L-alanine
  SITE 21: note = Ornithine
  SITE 24: note = Lysine is chemically modified through conjugation of the side chain with 24x Polyethylene glycol-(6S,16S)-6,16-bis(aminomethyl)-4,7,15,18-tetraoxo-11 -(4-oxobutanoyl)-5,8,11,14,17-pentaazahenicosanedioic acid (BEA-MalDap2) which is attached to two Fc sequences
  SITE 25: note = Alpha-methyl-L-tyrosine
  SITE 41: note = Amidated Glycine

SEQ ID NO: 803 - protein, 41 aa, synthetic construct; identical to SEQ ID NO: 104
  SITE 2: note = 2-aminoisobutyric acid
  SITE 6: note = (S)-2-amino-3-(2-fluorophenyl)-2-methylpropanoic acid
  SITE 11: note = Alpha-methyl-L-serine
  SITE 13: note = Alpha-methyl-L-leucine
  SITE 16: note = Ornithine
  SITE 17: note = Lysine is chemically modified through conjugation of the side chain with epsilon-Lysine-epsilon-Lysine-Gamma-Glutamic acid-CO-(CH2)16-CO2H
  SITE 20: note = Alpha-methyl-L-3-(4-pyridyl)-L-alanine
  SITE 21: note = Ornithine
  SITE 24: note = Lysine is chemically modified through conjugation of the side chain with 24x Polyethylene glycol-(6S,16S)-6,16-bis(aminomethyl)-4,7,15,18-tetraoxo-11 -(4-oxobutanoyl)-5,8,11,14,17-pentaazahenicosanedioic acid (BEA-MalDap2) which is attached to two Fc sequences
  SITE 25: note = Alpha-methyl-L-tyrosine
  SITE 41: note = Amidated Glycine

SEQ ID NO: 804 - protein, 35 aa, synthetic construct
  SITE 2: note = 2-aminoisobutyric acid
  SITE 6: note = (S)-2-amino-3-(2-fluorophenyl)-2-methylpropanoic acid
  SITE 10: note = 3-(4-pyridyl)-L-alanine
  SITE 11: note = Alpha-methyl-L-serine
  SITE 13: note = Alpha-methyl-L-leucine
  SITE 16: note = Ornithine
  SITE 17: note = Lysine is chemically modified through conjugation of the side chain with (2-[2-(2-amino-ethoxy)-ethoxy]-acetyl)2-Gamma-Glutamic acid-CO-(CH2)16-CO2H
  SITE 20: note = Alpha-methyl-L-3-(4-pyridyl)-L-alanine
  SITE 21: note = Ornithine
  SITE 25: note = Alpha-methyl-L-tyrosine
  SITE 35: note = Lysine amide is chemically modified through conjugation of the side chain with 24x Polyethylene glycol-(6S,16S)-6,16-bis(aminomethyl)-4,7,15,18-tetraoxo-11 -(4-oxobutanoyl)-5,8,11,14,17-pentaazahenicosanedioic acid (BEA-MalDap2) which is attached to two Fc sequences
YXQGTXTSDXXIXLDXKAQXXFIEXLIEGGPSSGK

SEQ ID NO: 805 - protein, 35 aa, synthetic construct
  SITE 2: note = 2-aminoisobutyric acid
  SITE 6: note = (S)-2-amino-3-(2-fluorophenyl)-2-methylpropanoic acid
  SITE 11: note = Alpha-methyl-L-serine
  SITE 13: note = Alpha-methyl-L-leucine
  SITE 16: note = Ornithine
  SITE 17: note = Lysine is chemically modified through conjugation of the side chain with (2-[2-(2-amino-ethoxy)-ethoxy]-acetyl)2-Gamma-Glutamic acid-CO-(CH2)16-CO2H
  SITE 20: note = Alpha-methyl-L-3-(4-pyridyl)-L-alanine
  SITE 21: note = Ornithine
  SITE 24: note = D-Glutamic acid
  SITE 25: note = Alpha-methyl-L-tyrosine
  SITE 35: note = Lysine amide is chemically modified through conjugation of the side chain with 24x Polyethylene glycol-(6S,16S)-6,16-bis(aminomethyl)-4,7,15,18-tetraoxo-11 -(4-oxobutanoyl)-5,8,11,14,17-pentaazahenicosanedioic acid (BEA-MalDap2) which is attached to two Fc sequences
YXQGTXTSDYXIXLDXKAQXXFIEXLIEGGPSSGK

SEQ ID NO: 806 - protein, 35 aa, synthetic construct; identical to SEQ ID NO: 804
  SITE 2: note = 2-aminoisobutyric acid
  SITE 6: note = (S)-2-amino-3-(2-fluorophenyl)-2-methylpropanoic acid
  SITE 10: note = 3-(4-pyridyl)-L-alanine
  SITE 11: note = Alpha-methyl-L-serine
  SITE 13: note = Alpha-methyl-L-leucine
  SITE 16: note = Ornithine
  SITE 17: note = Lysine is chemically modified through conjugation of the side chain with epsilon-Lysine-epsilon-Lysine-Gamma-Glutamic acid-CO-(CH2)16-CO2H
  SITE 20: note = Alpha-methyl-L-3-(4-pyridyl)-L-alanine
  SITE 21: note = Ornithine
  SITE 25: note = Alpha-methyl-L-tyrosine
  SITE 35: note = Lysine amide is chemically modified through conjugation of the side chain with 24x Polyethylene glycol-(6S,16S)-6,16-bis(aminomethyl)-4,7,15,18-tetraoxo-11 -(4-oxobutanoyl)-5,8,11,14,17-pentaazahenicosanedioic acid (BEA-MalDap2) which is attached to two Fc sequences

SEQ ID NO: 807 - protein, 35 aa, synthetic construct; identical to SEQ ID NO: 805
  SITE 2: note = 2-aminoisobutyric acid
  SITE 6: note = (S)-2-amino-3-(2-fluorophenyl)-2-methylpropanoic acid
  SITE 11: note = Alpha-methyl-L-serine
  SITE 13: note = Alpha-methyl-L-leucine
  SITE 16: note = Ornithine
  SITE 20: note = Alpha-methyl-L-3-(4-pyridyl)-L-alanine
  SITE 21: note = Ornithine
  SITE 24: note = D-Glutamic acid
  SITE 25: note = Alpha-methyl-L-tyrosine
  SITE 35: note = Lysine amide is chemically modified through conjugation of the side chain with 24x Polyethylene glycol-(6S,16S)-6,16-bis(aminomethyl)-4,7,15,18-tetraoxo-11 -(4-oxobutanoyl)-5,8,11,14,17-pentaazahenicosanedioic acid (BEA-MalDap2) which is attached to two Fc sequences

SEQ ID NO: 808 - protein, 32 aa, synthetic construct
  SITE 2: note = 2-aminoisobutyric acid
  SITE 6: note = (S)-2-amino-3-(2-fluorophenyl)-2-methylpropanoic acid
  SITE 10: note = 3-(4-pyridyl)-L-alanine
  SITE 11: note = Alpha-methyl-L-serine
  SITE 13: note = Alpha-methyl-L-leucine
  SITE 16: note = Ornithine
  SITE 17: note = Lysine is chemically modified through conjugation of the side chain with (2-[2-(2-amino-ethoxy)-ethoxy]-acetyl)2-Gamma-Glutamic acid-CO-(CH2)16-CO2H
  SITE 20: note = Alpha-methyl-L-3-(4-pyridyl)-L-alanine
  SITE 21: note = Ornithine
  SITE 25: note = Alpha-methyl-L-tyrosine
  SITE 32: note = Lysine amide is chemically modified through conjugation of the side chain with 24x Polyethylene glycol-(6S,16S)-6,16-bis(aminomethyl)-4,7,15,18-tetraoxo-11 -(4-oxobutanoyl)-5,8,11,14,17-pentaazahenicosanedioic acid (BEA-MalDap2) which is attached to two Fc sequences
YXQGTXTSDXXIXLDXKAQXXFIEXLIEGGGK

SEQ ID NO: 809 - protein, 32 aa, synthetic construct
  SITE 2: note = 2-aminoisobutyric acid
  SITE 6: note = (S)-2-amino-3-(2-fluorophenyl)-2-methylpropanoic acid
  SITE 11: note = Alpha-methyl-L-serine
  SITE 13: note = Alpha-methyl-L-leucine
  SITE 16: note = Ornithine
  SITE 17: note = Lysine is chemically modified through conjugation of the side chain with (2-[2-(2-amino-ethoxy)-ethoxy]-acetyl)2-Gamma-Glutamic acid-CO-(CH2)16-CO2H
  SITE 20: note = Alpha-methyl-L-3-(4-pyridyl)-L-alanine
  SITE 21: note = Ornithine
  SITE 24: note = D-Glutamic acid
  SITE 25: note = Alpha-methyl-L-tyrosine
  SITE 32: note = Lysine amide is chemically modified through conjugation of the side chain with 24x Polyethylene glycol-(6S,16S)-6,16-bis(aminomethyl)-4,7,15,18-tetraoxo-11 -(4-oxobutanoyl)-5,8,11,14,17-pentaazahenicosanedioic acid (BEA-MalDap2) which is attached to two Fc sequences
YXQGTXTSDYXIXLDXKAQXXFIEXLIEGGGK

SEQ ID NO: 810 - protein, 32 aa, synthetic construct; identical to SEQ ID NO: 808
  SITE 2: note = 2-aminoisobutyric acid
  SITE 6: note = (S)-2-amino-3-(2-fluorophenyl)-2-methylpropanoic acid
  SITE 10: note = 3-(4-pyridyl)-L-alanine
  SITE 11: note = Alpha-methyl-L-serine
  SITE 13: note = Alpha-methyl-L-leucine
  SITE 16: note = Ornithine
  SITE 17: note = Lysine is chemically modified through conjugation of the side chain with epsilon-Lysine-epsilon-Lysine-Gamma-Glutamic acid-CO-(CH2)16-CO2H
  SITE 20: note = Alpha-methyl-L-3-(4-pyridyl)-L-alanine
  SITE 21: note = Ornithine
  SITE 25: note = Alpha-methyl-L-tyrosine
  SITE 32: note = Lysine amide is chemically modified through conjugation of the side chain with 24x Polyethylene glycol-(6S,16S)-6,16-bis(aminomethyl)-4,7,15,18-tetraoxo-11 -(4-oxobutanoyl)-5,8,11,14,17-pentaazahenicosanedioic acid (BEA-MalDap2) which is attached to two Fc sequences

SEQ ID NO: 811 - protein, 32 aa, synthetic construct; identical to SEQ ID NO: 809
  SITE 2: note = 2-aminoisobutyric acid
  SITE 6: note = (S)-2-amino-3-(2-fluorophenyl)-2-methylpropanoic acid
  SITE 11: note = Alpha-methyl-L-serine
  SITE 13: note = Alpha-methyl-L-leucine
  SITE 16: note = Ornithine
  SITE 17: note = Lysine is chemically modified through conjugation of the side chain with epsilon-Lysine-epsilon-Lysine-Gamma-Glutamic acid-CO-(CH2)16-CO2H
  SITE 20: note = Alpha-methyl-L-3-(4-pyridyl)-L-alanine
  SITE 21: note = Ornithine
  SITE 24: note = D-Glutamic acid
  SITE 25: note = Alpha-methyl-L-tyrosine
  SITE 32: note = Lysine amide is chemically modified through conjugation of the side chain with 24x Polyethylene glycol-(6S,16S)-6,16-bis(aminomethyl)-4,7,15,18-tetraoxo-11 -(4-oxobutanoyl)-5,8,11,14,17-pentaazahenicosanedioic acid (BEA-MalDap2) which is attached to two Fc sequences

SEQ ID NO: 812 - protein, 47 aa, synthetic construct
  SITE 2: note = 2-aminoisobutyric acid
  SITE 6: note = (S)-2-amino-3-(2-fluorophenyl)-2-methylpropanoic acid
  SITE 10: note = 3-(4-pyridyl)-L-alanine
  SITE 11: note = Alpha-methyl-L-serine
  SITE 13: note = Alpha-methyl-L-leucine
  SITE 16: note = Ornithine
  SITE 17: note = Lysine is chemically modified through conjugation of the side chain with (2-[2-(2-amino-ethoxy)-ethoxy]-acetyl)2-Gamma-Glutamic acid-CO-(CH2)16-CO2H
  SITE 20: note = Alpha-methyl-L-3-(4-pyridyl)-L-alanine
  SITE 21: note = Ornithine
  SITE 25: note = Alpha-methyl-L-tyrosine
  SITE 47: note = Lysine amide is chemically modified through conjugation of the side chain with (6S,16S)-6,16-bis(aminomethyl)-4,7,15,18-tetraoxo-11-(4-oxo butanoyl)-5,8,11,14,17-pentaazahenicosanedioic acid (BEA-MalDap2) which is attached to two Fc sequences
YXQGTXTSDXXIXLDXKAQXXFIEXLIEGGGGGGGQGGGGQGGGGQK

SEQ ID NO: 813 - protein, 47 aa, synthetic construct
  SITE 2: note = 2-aminoisobutyric acid
  SITE 6: note = (S)-2-amino-3-(2-fluorophenyl)-2-methylpropanoic acid
  SITE 11: note = Alpha-methyl-L-serine
  SITE 13: note = Alpha-methyl-L-leucine
  SITE 16: note = Ornithine
  SITE 17: note = Lysine is chemically modified through conjugation of the side chain with (2-[2-(2-amino-ethoxy)-ethoxy]-acetyl)2-Gamma-Glutamic acid-CO-(CH2)16-CO2H
  SITE 20: note = Alpha-methyl-L-3-(4-pyridyl)-L-alanine
  SITE 21: note = Ornithine
  SITE 24: note = D-Glutamic acid
  SITE 25: note = Alpha-methyl-L-tyrosine
  SITE 47: note = Lysine amide is chemically modified through conjugation of the side chain with (6S,16S)-6,16-bis(aminomethyl)-4,7,15,18-tetraoxo-11-(4-oxo butanoyl)-5,8,11,14,17-pentaazahenicosanedioic acid (BEA-MalDap2) which is attached to two Fc sequences
YXQGTXTSDYXIXLDXKAQXXFIEXLIEGGGGGGGQGGGGQGGGGQK

SEQ ID NO: 814 - protein, 40 aa, synthetic construct; identical to SEQ ID NO: 790
  SITE 2: note = 2-aminoisobutyric acid
  SITE 6: note = (S)-2-amino-3-(2-fluorophenyl)-2-methylpropanoic acid
  SITE 10: note = 3-(4-pyridyl)-L-alanine
  SITE 11: note = Alpha-methyl-L-serine
  SITE 13: note = Alpha-methyl-L-leucine
  SITE 16: note = Ornithine
  SITE 17: note = Lysine is chemically modified through conjugation of the side chain with epsilon-Lysine-epsilon-Lysine-Gamma-Glutamic acid-CO-(CH2)16-CO2H
  SITE 20: note = Alpha-methyl-L-3-(4-pyridyl)-L-alanine
  SITE 21: note = Ornithine
  SITE 25: note = Alpha-methyl-L-tyrosine
  SITE 40: note = Lysine amide is chemically modified through conjugation of the side chain with 24x Polyethylene glycol-(6S,16S)-6,16-bis(aminomethyl)-4,7,15,18-tetraoxo-11 -(4-oxobutanoyl)-5,8,11,14,17-pentaazahenicosanedioic acid (BEA-MalDap2) which is attached to two Fc sequences

SEQ ID NO: 815 - protein, 40 aa, synthetic construct; identical to SEQ ID NO: 792
  SITE 2: note = 2-aminoisobutyric acid
  SITE 6: note = (S)-2-amino-3-(2-fluorophenyl)-2-methylpropanoic acid
  SITE 11: note = Alpha-methyl-L-serine
  SITE 13: note = Alpha-methyl-L-leucine
  SITE 16: note = Ornithine
  SITE 17: note = Lysine is chemically modified through conjugation of the side chain with epsilon-Lysine-epsilon-Lysine-Gamma-Glutamic acid-CO-(CH2)16-CO2H
  SITE 20: note = Alpha-methyl-L-3-(4-pyridyl)-L-alanine
  SITE 21: note = Ornithine
  SITE 24: note = D-Glutamic acid
  SITE 25: note = Alpha-methyl-L-tyrosine
  SITE 40: note = Lysine amide is chemically modified through conjugation of the side chain with 24x Polyethylene glycol-(6S,16S)-6,16-bis(aminomethyl)-4,7,15,18-tetraoxo-11 -(4-oxobutanoyl)-5,8,11,14,17-pentaazahenicosanedioic acid (BEA-MalDap2) which is attached to two Fc sequences

SEQ ID NO: 816 - protein, 35 aa, synthetic construct
  SITE 2: note = 2-aminoisobutyric acid
  SITE 6: note = (S)-2-amino-3-(2-fluorophenyl)-2-methylpropanoic acid
  SITE 10: note = 3-(4-pyridyl)-L-alanine
  SITE 11: note = Alpha-methyl-L-serine
  SITE 13: note = Alpha-methyl-L-leucine
  SITE 16: note = Ornithine
  SITE 17: note = Lysine is chemically modified through conjugation of the side chain with (2-[2-(2-amino-ethoxy)-ethoxy]-acetyl)2-Gamma-Glutamic acid-CO-(CH2)16-CO2H
  SITE 20: note = Alpha-methyl-L-3-(4-pyridyl)-L-alanine
  SITE 21: note = Ornithine
  SITE 24: note = D-Glutamic acid
  SITE 25: note = Alpha-methyl-L-tyrosine
  SITE 35: note = Lysine amide is chemically modified through conjugation of the side chain with 24x Polyethylene glycol-(6S,16S)-6,16-bis(aminomethyl)-4,7,15,18-tetraoxo-11 -(4-oxobutanoyl)-5,8,11,14,17-pentaazahenicosanedioic acid (BEA-MalDap2) which is attached to two Fc sequences
YXQGTXTSDXXIXLDXKAQXXFIEXLIEGSPSSGK

SEQ ID NO: 817 - protein, 47 aa, synthetic construct
  SITE 2: note = 2-aminoisobutyric acid
  SITE 6: note = (S)-2-amino-3-(2-fluorophenyl)-2-methylpropanoic acid
  SITE 10: note = 3-(4-pyridyl)-L-alanine
  SITE 11: note = Alpha-methyl-L-serine
  SITE 13: note = Alpha-methyl-L-leucine
  SITE 16: note = Ornithine
  SITE 17: note = Lysine is chemically modified through conjugation of the side chain with (2-[2-(2-amino-ethoxy)-ethoxy]-acetyl)2-Gamma-Glutamic acid-CO-(CH2)16-CO2H
  SITE 20: note = Alpha-methyl-L-3-(4-pyridyl)-L-alanine
  SITE 21: note = Ornithine
  SITE 24: note = D-Glutamic acid
  SITE 25: note = Alpha-methyl-L-tyrosine
  SITE 47: note = Lysine amide is chemically modified through conjugation of the side chain with (6S,16S)-6,16-bis(aminomethyl)-4,7,15,18-tetraoxo-11-(4-oxo butanoyl)-5,8,11,14,17-pentaazahenicosanedioic acid (BEA-MalDap2) which is attached to two Fc sequences
YXQGTXTSDXXIXLDXKAQXXFIEXLIEGGGGGGGSGGGGSGGGGSK

SEQ ID NO: 818 - protein, 55 aa, synthetic construct; identical to SEQ ID NO: 794
  SITE 2: note = 2-aminoisobutyric acid
  SITE 6: note = (S)-2-amino-3-(2-fluorophenyl)-2-methylpropanoic acid
  SITE 10: note = 3-(4-pyridyl)-L-alanine
  SITE 11: note = Alpha-methyl-L-serine
  SITE 13: note = Alpha-methyl-L-leucine
  SITE 16: note = Ornithine
  SITE 17: note = Lysine is chemically modified through conjugation of the side chain with (2-[2-(2-amino-ethoxy)-ethoxy]-acetyl)2-Gamma-Glutamic acid-CO-(CH2)16-CO2H
  SITE 20: note = Alpha-methyl-L-3-(4-pyridyl)-L-alanine
  SITE 21: note = Ornithine
  SITE 24: note = D-Glutamic acid
  SITE 25: note = Alpha-methyl-L-tyrosine
  SITE 55: note = Lysine amide is chemically modified through conjugation of the side chain with (6S,16S)-6,16-bis(aminomethyl)-4,7,15,18-tetraoxo-11-(4-oxo butanoyl)-5,8,11,14,17-pentaazahenicosanedioic acid (BEA-MalDap2) which is attached to two Fc sequences

SEQ ID NO: 819 - protein, 32 aa, synthetic construct; identical to SEQ ID NO: 808
  SITE 2: note = 2-aminoisobutyric acid
  SITE 6: note = (S)-2-amino-3-(2-fluorophenyl)-2-methylpropanoic acid
  SITE 10: note = 3-(4-pyridyl)-L-alanine
  SITE 11: note = Alpha-methyl-L-serine
  SITE 13: note = Alpha-methyl-L-leucine
  SITE 16: note = Ornithine
  SITE 17: note = Lysine is chemically modified through conjugation of the side chain with (2-[2-(2-amino-ethoxy)-ethoxy]-acetyl)2-Gamma-Glutamic acid-CO-(CH2)16-CO2H
  SITE 20: note = Alpha-methyl-L-3-(4-pyridyl)-L-alanine
  SITE 21: note = Ornithine
  SITE 24: note = D-Glutamic acid
  SITE 25: note = Alpha-methyl-L-tyrosine
  SITE 32: note = Lysine amide is chemically modified through conjugation of the side chain with 24x Polyethylene glycol-(6S,16S)-6,16-bis(aminomethyl)-4,7,15,18-tetraoxo-11 -(4-oxobutanoyl)-5,8,11,14,17-pentaazahenicosanedioic acid (BEA-MalDap2) which is attached to two Fc sequences

SEQ ID NO: 820 - protein, 40 aa, synthetic construct; identical to SEQ ID NO: 790
  SITE 2: note = 2-aminoisobutyric acid
  SITE 6: note = (S)-2-amino-3-(2-fluorophenyl)-2-methylpropanoic acid
  SITE 10: note = 3-(4-pyridyl)-L-alanine
  SITE 11: note = Alpha-methyl-L-serine
  SITE 13: note = Alpha-methyl-L-leucine
  SITE 16: note = Ornithine
  SITE 17: note = Lysine is chemically modified through conjugation of the side chain with epsilon-Lysine-epsilon-Lysine-Gamma-Glutamic acid-CO-(CH2)16-CO2H
  SITE 20: note = Alpha-methyl-L-3-(4-pyridyl)-L-alanine
  SITE 21: note = Ornithine
  SITE 24: note = D-Glutamic acid
  SITE 25: note = Alpha-methyl-L-tyrosine
  SITE 40: note = Lysine amide is chemically modified through conjugation of the side chain with 24x Polyethylene glycol-(6S,16S)-6,16-bis(aminomethyl)-4,7,15,18-tetraoxo-11 -(4-oxobutanoyl)-5,8,11,14,17-pentaazahenicosanedioic acid (BEA-MalDap2) which is attached to two Fc sequences

SEQ ID NO: 821 - protein, 40 aa, synthetic construct
  SITE 2: note = 2-aminoisobutyric acid
  SITE 6: note = (S)-2-amino-3-(2-fluorophenyl)-2-methylpropanoic acid
  SITE 10: note = 3-(4-pyridyl)-L-alanine
  SITE 11: note = Alpha-methyl-L-serine
  SITE 13: note = Alpha-methyl-L-leucine
  SITE 16: note = Ornithine
  SITE 17: note = Lysine is chemically modified through conjugation of the side chain with (2-[2-(2-amino-ethoxy)-ethoxy]-acetyl)2-Gamma-Glutamic acid-CO-(CH2)16-CO2H
  SITE 20: note = Alpha-methyl-L-3-(4-pyridyl)-L-alanine
  SITE 21: note = Ornithine
  SITE 25: note = Alpha-methyl-L-tyrosine
  SITE 40: note = Lysine amide is chemically modified through conjugation of the side chain with 24x Polyethylene glycol-(6S,16S)-6,16-bis(aminomethyl)-4,7,15,18-tetraoxo-11 -(4-oxobutanoyl)-5,8,11,14,17-pentaazahenicosanedioic acid (BEA-MalDap2) which is attached to two Fc sequences
YXQGTXTSDXXIXLDXKAQXXFIQXLIEGSPSSGAPPPSK

SEQ ID NO: 822 - protein, 40 aa, synthetic construct; identical to SEQ ID NO: 821
  SITE 2: note = 2-aminoisobutyric acid
  SITE 6: note = (S)-2-amino-3-(2-fluorophenyl)-2-methylpropanoic acid
  SITE 10: note = 3-(4-pyridyl)-L-alanine
  SITE 11: note = Alpha-methyl-L-serine
  SITE 13: note = Alpha-methyl-L-leucine
  SITE 16: note = Ornithine
  SITE 17: note = Lysine is chemically modified through conjugation of the side chain with epsilon-Lysine-epsilon-Lysine-Gamma-Glutamic acid-CO-(CH2)16-CO2H
  SITE 20: note = Alpha-methyl-L-3-(4-pyridyl)-L-alanine
  SITE 21: note = Ornithine
  SITE 25: note = Alpha-methyl-L-tyrosine
  SITE 40: note = Lysine amide is chemically modified through conjugation of the side chain with 24x Polyethylene glycol-(6S,16S)-6,16-bis(aminomethyl)-4,7,15,18-tetraoxo-11 -(4-oxobutanoyl)-5,8,11,14,17-pentaazahenicosanedioic acid (BEA-MalDap2) which is attached to two Fc sequences

SEQ ID NO: 823 - protein, 40 aa, synthetic construct
  SITE 2: note = 2-aminoisobutyric acid
  SITE 6: note = (S)-2-amino-3-(2-fluorophenyl)-2-methylpropanoic acid
  SITE 11: note = Alpha-methyl-L-serine
  SITE 13: note = Alpha-methyl-L-leucine
  SITE 16: note = Ornithine
  SITE 17: note = Lysine is chemically modified through conjugation of the side chain with (2-[2-(2-amino-ethoxy)-ethoxy]-acetyl)2-Gamma-Glutamic acid-CO-(CH2)16-CO2H
  SITE 20: note = Alpha-methyl-L-3-(4-pyridyl)-L-alanine
  SITE 21: note = Ornithine
  SITE 25: note = Alpha-methyl-L-tyrosine
  SITE 40: note = Lysine amide is chemically modified through conjugation of the side chain with 24x Polyethylene glycol-(6S,16S)-6,16-bis(aminomethyl)-4,7,15,18-tetraoxo-11 -(4-oxobutanoyl)-5,8,11,14,17-pentaazahenicosanedioic acid (BEA-MalDap2) which is attached to two Fc sequences
YXQGTXTSDYXIXLDXKAQXXFIQXLIEGSPSSGAPPPSK

SEQ ID NO: 824 - protein, 40 aa, synthetic construct; identical to SEQ ID NO: 823
  SITE 2: note = 2-aminoisobutyric acid
  SITE 6: note = (S)-2-amino-3-(2-fluorophenyl)-2-methylpropanoic acid
  SITE 11: note = Alpha-methyl-L-serine
  SITE 13: note = Alpha-methyl-L-leucine
  SITE 16: note = Ornithine
  SITE 17: note = Lysine is chemically modified through conjugation of the side chain with epsilon-Lysine-epsilon-Lysine-Gamma-Glutamic acid-CO-(CH2)16-CO2H
  SITE 20: note = Alpha-methyl-L-3-(4-pyridyl)-L-alanine
  SITE 21: note = Ornithine
  SITE 25: note = Alpha-methyl-L-tyrosine
  SITE 40: note = Lysine amide is chemically modified through conjugation of the side chain with 24x Polyethylene glycol-(6S,16S)-6,16-bis(aminomethyl)-4,7,15,18-tetraoxo-11 -(4-oxobutanoyl)-5,8,11,14,17-pentaazahenicosanedioic acid (BEA-MalDap2) which is attached to two Fc sequences

SEQ ID NO: 825 - protein, 40 aa, synthetic construct; identical to SEQ ID NO: 792
  SITE 2: note = 2-aminoisobutyric acid
  SITE 6: note = (S)-2-amino-3-(2-fluorophenyl)-2-methylpropanoic acid
  SITE 11: note = Alpha-methyl-L-serine
  SITE 13: note = Alpha-methyl-L-leucine
  SITE 16: note = Ornithine
  SITE 17: note = Lysine is chemically modified through conjugation of the side chain with (2-[2-(2-amino-ethoxy)-ethoxy]-acetyl)2-Gamma-Glutamic acid-CO-(CH2)16-CO2H
  SITE 20: note = Alpha-methyl-L-3-(4-pyridyl)-L-alanine
  SITE 21: note = Ornithine
  SITE 24: note = D-Glutamic acid
  SITE 25: note = Alpha-methyl-L-tyrosine
  SITE 40: note = Lysine amide is chemically modified through conjugation of the side chain with (2-[2-(2-amino-ethoxy)-ethoxy]-acetyl)6-GPAPAPAPAPAPA-(6S,1 6S)-6,16-bis(aminomethyl)-4,7,15,18-tetraoxo-11-(4-oxobutan oyl)-5,8,11,14,17-pentaazahenicosanedioic acid (BEA-MalDap2) which is attached to two Fc sequences

SEQ ID NO: 826 - protein, 40 aa, synthetic construct
  SITE 2: note = 2-aminoisobutyric acid
  SITE 6: note = (S)-2-amino-3-(2-fluorophenyl)-2-methylpropanoic acid
  SITE 11: note = Alpha-methyl-L-serine
  SITE 13: note = Alpha-methyl-L-leucine
  SITE 16: note = Ornithine
  SITE 17: note = Lysine is chemically modified through conjugation of the side chain with (2-[2-(2-amino-ethoxy)-ethoxy]-acetyl)2-Gamma-Glutamic acid-CO-(CH2)16-CO2H
  SITE 20: note = Alpha-methyl-L-3-(4-pyridyl)-L-alanine
  SITE 21: note = Ornithine
  SITE 24: note = D-Glutamic acid
  SITE 25: note = Alpha-methyl-L-tyrosine
  SITE 29: note = 2-aminoisobutyric acid
  SITE 40: note = Lysine amide is chemically modified through conjugation of the side chain with 24x Polyethylene glycol-(6S,16S)-6,16-bis(aminomethyl)-4,7,15,18-tetraoxo-11 -(4-oxobutanoyl)-5,8,11,14,17-pentaazahenicosanedioic acid (BEA-MalDap2) which is attached to two Fc sequences
YXQGTXTSDYXIXLDXKAQXXFIEXLIEXSPSSGAPPPSK

SEQ ID NO: 827 - protein, 40 aa, synthetic construct
  SITE 2: note = 2-aminoisobutyric acid
  SITE 6: note = (S)-2-amino-3-(2-fluorophenyl)-2-methylpropanoic acid
  SITE 11: note = Alpha-methyl-L-serine
  SITE 13: note = Alpha-methyl-L-leucine
  SITE 16: note = Ornithine
  SITE 17: note = Lysine is chemically modified through conjugation of the side chain with (2-[2-(2-amino-ethoxy)-ethoxy]-acetyl)2-Gamma-Glutamic acid-CO-(CH2)16-CO2H
  SITE 20: note = Alpha-methyl-L-3-(4-pyridyl)-L-alanine
  SITE 24: note = D-Glutamic acid
  SITE 25: note = Alpha-methyl-L-tyrosine
  SITE 40: note = Lysine amide is chemically modified through conjugation of the side chain with 24x Polyethylene glycol-(6S,16S)-6,16-bis(aminomethyl)-4,7,15,18-tetraoxo-11 -(4-oxobutanoyl)-5,8,11,14,17-pentaazahenicosanedioic acid (BEA-MalDap2) which is attached to two Fc sequences
YXQGTXTSDYXIXLDXKAQXEFIEXLIEGSPSSGAPPPSK

SEQ ID NO: 828 - protein, 40 aa, synthetic construct
  SITE 2: note = 2-aminoisobutyric acid
  SITE 6: note = (S)-2-amino-3-(2-fluorophenyl)-2-methylpropanoic acid
  SITE 11: note = Alpha-methyl-L-serine
  SITE 13: note = Alpha-methyl-L-leucine
  SITE 16: note = Ornithine
  SITE 17: note = Lysine is chemically modified through conjugation of the side chain with (2-[2-(2-amino-ethoxy)-ethoxy]-acetyl)2-Gamma-Glutamic acid-CO-(CH2)16-CO2H
  SITE 20: note = Alpha-methyl-L-3-(4-pyridyl)-L-alanine
  SITE 25: note = Alpha-methyl-L-tyrosine
  SITE 40: note = Lysine amide is chemically modified through conjugation of the side chain with 24x Polyethylene glycol-(6S,16S)-6,16-bis(aminomethyl)-4,7,15,18-tetraoxo-11 -(4-oxobutanoyl)-5,8,11,14,17-pentaazahenicosanedioic acid (BEA-MalDap2) which is attached to two Fc sequences
YXQGTXTSDYXIXLDXKAQXEFIQXLIEGSPSSGAPPPSK

SEQ ID NO: 829 - protein, 40 aa, synthetic construct; identical to SEQ ID NO: 828
  SITE 2: note = 2-aminoisobutyric acid
  SITE 6: note = (S)-2-amino-3-(2-fluorophenyl)-2-methylpropanoic acid
  SITE 11: note = Alpha-methyl-L-serine
  SITE 13: note = Alpha-methyl-L-leucine
  SITE 16: note = Ornithine
  SITE 17: note = Lysine is chemically modified through conjugation of the side chain with (2-[2-(2-amino-ethoxy)-ethoxy]-acetyl)2-Gamma-Glutamic acid-CO-(CH2)16-CO2H
  SITE 20: note = 2-aminoisobutyric acid
  SITE 25: note = Alpha-methyl-L-tyrosine
  SITE 40: note = Lysine amide is chemically modified through conjugation of the side chain with 24x Polyethylene glycol-(6S,16S)-6,16-bis(aminomethyl)-4,7,15,18-tetraoxo-11 -(4-oxobutanoyl)-5,8,11,14,17-pentaazahenicosanedioic acid (BEA-MalDap2) which is attached to two Fc sequences

SEQ ID NO: 830 - protein, 40 aa, synthetic construct
  SITE 2: note = 2-aminoisobutyric acid
  SITE 6: note = (S)-2-amino-3-(2-fluorophenyl)-2-methylpropanoic acid
  SITE 11: note = Alpha-methyl-L-serine
  SITE 13: note = Alpha-methyl-L-leucine
  SITE 16: note = Ornithine
  SITE 17: note = Lysine is chemically modified through conjugation of the side chain with (2-[2-(2-amino-ethoxy)-ethoxy]-acetyl)2-Gamma-Glutamic acid-CO-(CH2)16-CO2H
  SITE 20: note = Alpha-methyl-L-3-(4-pyridyl)-L-alanine
  SITE 25: note = Alpha-methyl-L-tyrosine
  SITE 40: note = Lysine amide is chemically modified through conjugation of the side chain with 24x Polyethylene glycol-(6S,16S)-6,16-bis(aminomethyl)-4,7,15,18-tetraoxo-11 -(4-oxobutanoyl)-5,8,11,14,17-pentaazahenicosanedioic acid (BEA-MalDap2) which is attached to two Fc sequences
YXQGTXTSDYXIXLDXKAQXEFIQXLLEGSPSSGAPPPSK

SEQ ID NO: 831 - protein, 47 aa, synthetic construct
  SITE 2: note = 2-aminoisobutyric acid
  SITE 6: note = (S)-2-amino-3-(2-fluorophenyl)-2-methylpropanoic acid
  SITE 11: note = Alpha-methyl-L-serine
  SITE 13: note = Alpha-methyl-L-leucine
  SITE 16: note = Ornithine
  SITE 17: note = Lysine is chemically modified through conjugation of the side chain with (2-[2-(2-amino-ethoxy)-ethoxy]-acetyl)2-Gamma-Glutamic acid-CO-(CH2)16-CO2H
  SITE 20: note = Alpha-methyl-L-3-(4-pyridyl)-L-alanine
  SITE 21: note = Ornithine
  SITE 24: note = D-Glutamic acid
  SITE 25: note = Alpha-methyl-L-tyrosine
  SITE 47: note = Lysine amide is chemically modified through conjugation of the side chain with (6S,16S)-6,16-bis(aminomethyl)-4,7,15,18-tetraoxo-11-(4-oxo butanoyl)-5,8,11,14,17-pentaazahenicosanedioic acid (BEA-MalDap2) which is attached to two Fc sequences
YXQGTXTSDYXIXLDXKAQXXFIEXLIEGGGGGGGSGGGGSGGGGSK

SEQ ID NO: 832 - protein, 40 aa, synthetic construct
  SITE 2: note = 2-aminoisobutyric acid
  SITE 6: note = (S)-2-amino-3-(2-fluorophenyl)-2-methylpropanoic acid
  SITE 10: note = 3-(4-pyridyl)-L-alanine
  SITE 13: note = Alpha-methyl-L-leucine
  SITE 16: note = Ornithine
  SITE 17: note = Lysine is chemically modified through conjugation of the side chain with (2-[2-(2-amino-ethoxy)-ethoxy]-acetyl)2-Gamma-Glutamic acid-CO-(CH2)16-CO2H
  SITE 20: note = Alpha-methyl-L-3-(4-pyridyl)-L-alanine
  SITE 21: note = Ornithine
  SITE 25: note = Alpha-methyl-L-tyrosine
  SITE 40: note = Lysine amide is chemically modified through conjugation of the side chain with 24x Polyethylene glycol-(6S,16S)-6,16-bis(aminomethyl)-4,7,15,18-tetraoxo-11 -(4-oxobutanoyl)-5,8,11,14,17-pentaazahenicosanedioic acid (BEA-MalDap2) which is attached to two Fc sequences
YXQGTXTSDXSIXLDXKAQXXFIQXLIEGSPSSGAPPPSK

SEQ ID NO: 833 - protein, 47 aa, synthetic construct
  SITE 2: note = 2-aminoisobutyric acid
  SITE 6: note = (S)-2-amino-3-(2-fluorophenyl)-2-methylpropanoic acid
  SITE 11: note = Alpha-methyl-L-serine
  SITE 13: note = Alpha-methyl-L-leucine
  SITE 16: note = Ornithine
  SITE 17: note = Lysine is chemically modified through conjugation of the side chain with (2-[2-(2-amino-ethoxy)-ethoxy]-acetyl)2-Gamma-Glutamic acid-CO-(CH2)16-CO2H
  SITE 20: note = Alpha-methyl-L-3-(4-pyridyl)-L-alanine
  SITE 21: note = Ornithine
  SITE 24: note = D-Glutamic acid
  SITE 25: note = Alpha-methyl-L-tyrosine
  SITE 29: note = 2-aminoisobutyric acid
  SITE 47: note = Lysine amide is chemically modified through conjugation of the side chain with (6S,16S)-6,16-bis(aminomethyl)-4,7,15,18-tetraoxo-11-(4-oxo butanoyl)-5,8,11,14,17-pentaazahenicosanedioic acid (BEA-MalDap2) which is attached to two Fc sequences
YXQGTXTSDYXIXLDXKAQXXFIEXLIEXGGGGGGSGGGGSGGGGSK

SEQ ID NO: 834 - protein, 40 aa, synthetic construct
  SITE 2: note = 2-aminoisobutyric acid
  SITE 4: note = D-Alanine
  SITE 6: note = (S)-2-amino-3-(2-fluorophenyl)-2-methylpropanoic acid
  SITE 11: note = Alpha-methyl-L-serine
  SITE 13: note = Alpha-methyl-L-leucine
  SITE 16: note = Ornithine
  SITE 17: note = Lysine is chemically modified through conjugation of the side chain with (2-[2-(2-amino-ethoxy)-ethoxy]-acetyl)2-Gamma-Glutamic acid-CO-(CH2)16-CO2H
  SITE 20: note = Alpha-methyl-L-3-(4-pyridyl)-L-alanine
  SITE 25: note = Alpha-methyl-L-tyrosine
  SITE 40: note = Lysine amide is chemically modified through conjugation of the side chain with 24x Polyethylene glycol-(6S,16S)-6,16-bis(aminomethyl)-4,7,15,18-tetraoxo-11 -(4-oxobutanoyl)-5,8,11,14,17-pentaazahenicosanedioic acid (BEA-MalDap2) which is attached to two Fc sequences
YXQATXTSDYXIXLDXKAQXEFIQXLIEGSPSSGAPPPSK

SEQ ID NO: 835 - protein, 40 aa, synthetic construct; identical to SEQ ID NO: 828
  SITE 2: note = Alpha-methyl-L-serine
  SITE 6: note = (S)-2-amino-3-(2-fluorophenyl)-2-methylpropanoic acid
  SITE 11: note = Alpha-methyl-L-serine
  SITE 13: note = Alpha-methyl-L-leucine
  SITE 16: note = Ornithine
  SITE 17: note = Lysine is chemically modified through conjugation of the side chain with (2-[2-(2-amino-ethoxy)-ethoxy]-acetyl)2-Gamma-Glutamic acid-CO-(CH2)16-CO2H
  SITE 20: note = Alpha-methyl-L-3-(4-pyridyl)-L-alanine
  SITE 25: note = Alpha-methyl-L-tyrosine
  SITE 40: note = Lysine amide is chemically modified through conjugation of the side chain with 24x Polyethylene glycol-(6S,16S)-6,16-bis(aminomethyl)-4,7,15,18-tetraoxo-11 -(4-oxobutanoyl)-5,8,11,14,17-pentaazahenicosanedioic acid (BEA-MalDap2) which is attached to two Fc sequences

SEQ ID NO: 836 - protein, 40 aa, synthetic construct; identical to SEQ ID NO: 828
  SITE 2: note = L-isovaline
  SITE 6: note = (S)-2-amino-3-(2-fluorophenyl)-2-methylpropanoic acid
  SITE 11: note = Alpha-methyl-L-serine
  SITE 13: note = Alpha-methyl-L-leucine
  SITE 16: note = Ornithine
  SITE 17: note = Lysine is chemically modified through conjugation of the side chain with (2-[2-(2-amino-ethoxy)-ethoxy]-acetyl)2-Gamma-Glutamic acid-CO-(CH2)16-CO2H
  SITE 20: note = Alpha-methyl-L-3-(4-pyridyl)-L-alanine
  SITE 25: note = Alpha-methyl-L-tyrosine
  SITE 40: note = Lysine amide is chemically modified through conjugation of the side chain with 24x Polyethylene glycol-(6S,16S)-6,16-bis(aminomethyl)-4,7,15,18-tetraoxo-11 -(4-oxobutanoyl)-5,8,11,14,17-pentaazahenicosanedioic acid (BEA-MalDap2) which is attached to two Fc sequences

SEQ ID NO: 837 - protein, 40 aa, synthetic construct
  SITE 2: note = 2-aminoisobutyric acid
  SITE 6: note = (S)-2-amino-3-(2-fluorophenyl)-2-methylpropanoic acid
  SITE 11: note = Alpha-methyl-L-serine
  SITE 13: note = Alpha-methyl-L-leucine
  SITE 16: note = Ornithine
  SITE 17: note = Lysine is chemically modified through conjugation of the side chain with (2-[2-(2-amino-ethoxy)-ethoxy]-acetyl)2-Gamma-Glutamic acid-CO-(CH2)16-CO2H
  SITE 20: note = Alpha-methyl-L-3-(4-pyridyl)-L-alanine
  SITE 25: note = Alpha-methyl-L-tyrosine
  SITE 40: note = Lysine amide is chemically modified through conjugation of the side chain with 24x Polyethylene glycol-(6S,16S)-6,16-bis(aminomethyl)-4,7,15,18-tetraoxo-11 -(4-oxobutanoyl)-5,8,11,14,17-pentaazahenicosanedioic acid (BEA-MalDap2) which is attached to two Fc sequences
YXHGTXTSDYXIXLDXKAQXEFIQXLIEGSPSSGAPPPSK

SEQ ID NO: 838 - protein, 40 aa, synthetic construct
  SITE 2: note = 2-aminoisobutyric acid
  SITE 6: note = (S)-2-amino-3-(2-fluorophenyl)-2-methylpropanoic acid
  SITE 11: note = Alpha-methyl-L-serine
  SITE 13: note = Alpha-methyl-L-leucine
  SITE 16: note = Ornithine
  SITE 17: note = Lysine is chemically modified through conjugation of the side chain with (2-[2-(2-amino-ethoxy)-ethoxy]-acetyl)2-Gamma-Glutamic acid-CO-(CH2)16-CO2H
  SITE 20: note = Alpha-methyl-L-3-(4-pyridyl)-L-alanine
  SITE 25: note = Alpha-methyl-L-tyrosine
  SITE 40: note = Lysine amide is chemically modified through conjugation of the side chain with 24x Polyethylene glycol-(6S,16S)-6,16-bis(aminomethyl)-4,7,15,18-tetraoxo-11 -(4-oxobutanoyl)-5,8,11,14,17-pentaazahenicosanedioic acid (BEA-MalDap2) which is attached to two Fc sequences
HXHGTXTSDYXIXLDXKAQXEFIQXLIEGSPSSGAPPPSK

SEQ ID NO: 839 - protein, 40 aa, synthetic construct; identical to SEQ ID NO: 838
  SITE 2: note = 2-aminoisobutyric acid
  SITE 6: note = (S)-2-amino-3-(2-fluorophenyl)-2-methylpropanoic acid
  SITE 11: note = Alpha-methyl-L-serine
  SITE 13: note = Alpha-methyl-L-leucine
  SITE 16: note = Ornithine
  SITE 17: note = Lysine is chemically modified through conjugation of the side chain with (2-[2-(2-amino-ethoxy)-ethoxy]-acetyl)2-Gamma-Glutamic acid-CO-(CH2)16-CO2H
  SITE 20: note = 2-aminoisobutyric acid
  SITE 25: note = Alpha-methyl-L-tyrosine
  SITE 40: note = Lysine amide is chemically modified through conjugation of the side chain with 24x Polyethylene glycol-(6S,16S)-6,16-bis(aminomethyl)-4,7,15,18-tetraoxo-11 -(4-oxobutanoyl)-5,8,11,14,17-pentaazahenicosanedioic acid (BEA-MalDap2) which is attached to two Fc sequences

SEQ ID NO: 840 - protein, 40 aa, synthetic construct
  SITE 2: note = 2-aminoisobutyric acid
  SITE 6: note = (S)-2-amino-3-(2-fluorophenyl)-2-methylpropanoic acid
  SITE 10: note = 3-(4-pyridyl)-L-alanine
  SITE 11: note = Alpha-methyl-L-serine
  SITE 13: note = Alpha-methyl-L-leucine
  SITE 16: note = Ornithine
  SITE 17: note = Lysine is chemically modified through conjugation of the side chain with (2-[2-(2-amino-ethoxy)-ethoxy]-acetyl)2-Gamma-Glutamic acid-CO-(CH2)16-CO2H
  SITE 20: note = Alpha-methyl-L-3-(4-pyridyl)-L-alanine
  SITE 25: note = Alpha-methyl-L-tyrosine
  SITE 40: note = Lysine amide is chemically modified through conjugation of the side chain with 24x Polyethylene glycol-(6S,16S)-6,16-bis(aminomethyl)-4,7,15,18-tetraoxo-11 -(4-oxobutanoyl)-5,8,11,14,17-pentaazahenicosanedioic acid (BEA-MalDap2) which is attached to two Fc sequences
HXHGTXTSDXXIXLDXKAQXEFIQXLIEGSPSSGAPPPSK

SEQ ID NO: 841 - protein, 40 aa, synthetic construct
  SITE 2: note = 2-aminoisobutyric acid
  SITE 6: note = (S)-2-amino-3-(2-fluorophenyl)-2-methylpropanoic acid
  SITE 10: note = 3-(4-pyridyl)-L-alanine
  SITE 13: note = Alpha-methyl-L-leucine
  SITE 16: note = Ornithine
  SITE 17: note = Lysine is chemically modified through conjugation of the side chain with (2-[2-(2-amino-ethoxy)-ethoxy]-acetyl)2-Gamma-Glutamic acid-CO-(CH2)16-CO2H
  SITE 20: note = Alpha-methyl-L-3-(4-pyridyl)-L-alanine
  SITE 25: note = Alpha-methyl-L-tyrosine
  SITE 40: note = Lysine amide is chemically modified through conjugation of the side chain with 24x Polyethylene glycol-(6S,16S)-6,16-bis(aminomethyl)-4,7,15,18-tetraoxo-11 -(4-oxobutanoyl)-5,8,11,14,17-pentaazahenicosanedioic acid (BEA-MalDap2) which is attached to two Fc sequences
HXHGTXTSDXSIXLDXKAQXEFIQXLIEGSPSSGAPPPSK

SEQ ID NO: 842 - protein, 40 aa, synthetic construct
  SITE 2: note = 2-aminoisobutyric acid
  SITE 6: note = (S)-2-amino-3-(2-fluorophenyl)-2-methylpropanoic acid
  SITE 11: note = Alpha-methyl-L-serine
  SITE 13: note = Alpha-methyl-L-leucine
  SITE 16: note = Ornithine
  SITE 17: note = Lysine is chemically modified through conjugation of the side chain with (2-[2-(2-amino-ethoxy)-ethoxy]-acetyl)2-Gamma-Glutamic acid-CO-(CH2)16-CO2H
  SITE 20: note = Alpha-methyl-L-3-(4-pyridyl)-L-alanine
  SITE 25: note = Alpha-methyl-L-tyrosine
  SITE 29: note = 2-aminoisobutyric acid
  SITE 40: note = Lysine amide is chemically modified through conjugation of the side chain with 24x Polyethylene glycol-(6S,16S)-6,16-bis(aminomethyl)-4,7,15,18-tetraoxo-11 -(4-oxobutanoyl)-5,8,11,14,17-pentaazahenicosanedioic acid (BEA-MalDap2) which is attached to two Fc sequences
YXQGTXTSDYXIXLDXKAQXEFIQXLIEXSPSSGAPPPSK

SEQ ID NO: 843 - protein, 40 aa, synthetic construct; identical to SEQ ID NO: 827
  SITE 2: note = 2-aminoisobutyric acid
  SITE 6: note = (S)-2-amino-3-(2-fluorophenyl)-2-methylpropanoic acid
  SITE 11: note = Alpha-methyl-L-serine
  SITE 13: note = Alpha-methyl-L-leucine
  SITE 16: note = Ornithine
  SITE 17: note = Lysine is chemically modified through conjugation of the side chain with (2-[2-(2-amino-ethoxy)-ethoxy]-acetyl)2-Gamma-Glutamic acid-CO-(CH2)16-CO2H
  SITE 20: note = Alpha-methyl-L-3-(4-pyridyl)-L-alanine
  SITE 25: note = Alpha-methyl-L-tyrosine
  SITE 40: note = Lysine amide is chemically modified through conjugation of the side chain with 24x Polyethylene glycol-(6S,16S)-6,16-bis(aminomethyl)-4,7,15,18-tetraoxo-11 -(4-oxobutanoyl)-5,8,11,14,17-pentaazahenicosanedioic acid (BEA-MalDap2) which is attached to two Fc sequences

SEQ ID NO: 844 - protein, 40 aa, synthetic construct
  SITE 2: note = 2-aminoisobutyric acid
  SITE 6: note = (S)-2-amino-3-(2-fluorophenyl)-2-methylpropanoic acid
  SITE 10: note = 3-(4-pyridyl)-L-alanine
  SITE 11: note = Alpha-methyl-L-serine
  SITE 13: note = Alpha-methyl-L-leucine
  SITE 16: note = Ornithine
  SITE 17: note = Lysine is chemically modified through conjugation of the side chain with (2-[2-(2-amino-ethoxy)-ethoxy]-acetyl)2-Gamma-Glutamic acid-CO-(CH2)16-CO2H
  SITE 20: note = Alpha-methyl-L-3-(4-pyridyl)-L-alanine
  SITE 25: note = Alpha-methyl-L-tyrosine
  SITE 40: note = Lysine amide is chemically modified through conjugation of the side chain with 24x Polyethylene glycol-(6S,16S)-6,16-bis(aminomethyl)-4,7,15,18-tetraoxo-11 -(4-oxobutanoyl)-5,8,11,14,17-pentaazahenicosanedioic acid (BEA-MalDap2) which is attached to two Fc sequences
YXQGTXTSDXXIXLDXKAQXEFIQXLIEGSPSSGAPPPSK

SEQ ID NO: 845 - protein, 40 aa, synthetic construct
  SITE 2: note = 2-aminoisobutyric acid
  SITE 6: note = (S)-2-amino-3-(2-fluorophenyl)-2-methylpropanoic acid
  SITE 10: note = 3-(4-pyridyl)-L-alanine
  SITE 11: note = Alpha-methyl-L-serine
  SITE 13: note = Alpha-methyl-L-leucine
  SITE 16: note = Ornithine
  SITE 17: note = Lysine is chemically modified through conjugation of the side chain with (2-[2-(2-amino-ethoxy)-ethoxy]-acetyl)2-Gamma-Glutamic acid-CO-(CH2)16-CO2H
  SITE 20: note = Alpha-methyl-L-3-(4-pyridyl)-L-alanine
  SITE 25: note = Alpha-methyl-L-tyrosine
  SITE 40: note = Lysine amide is chemically modified through conjugation of the side chain with 24x Polyethylene glycol-(6S,16S)-6,16-bis(aminomethyl)-4,7,15,18-tetraoxo-11 -(4-oxobutanoyl)-5,8,11,14,17-pentaazahenicosanedioic acid (BEA-MalDap2) which is attached to two Fc sequences
YXQGTXTSDXXIXLDXKAQXEFIEXLIEGSPSSGAPPPSK

SEQ ID NO: 846 - protein, 40 aa, synthetic construct; identical to SEQ ID NO: 828
  SITE 2: note = 2-aminoisobutyric acid
  SITE 6: note = (S)-2-amino-3-(2-fluorophenyl)-2-methylpropanoic acid
  SITE 11: note = Alpha-methyl-L-serine
  SITE 13: note = Alpha-methyl-L-leucine
  SITE 16: note = Ornithine
  SITE 17: note = Lysine is chemically modified through conjugation of the side chain with 2-[2-(2-amino-ethoxy)-ethoxy]-acetyl-Gamma-Glutamic acid-CO-(CH2)16-CO2H
  SITE 20: note = Alpha-methyl-L-3-(4-pyridyl)-L-alanine
  SITE 25: note = Alpha-methyl-L-tyrosine
  SITE 40: note = Lysine amide is chemically modified through conjugation of the side chain with 24x Polyethylene glycol-(6S,16S)-6,16-bis(aminomethyl)-4,7,15,18-tetraoxo-11 -(4-oxobutanoyl)-5,8,11,14,17-pentaazahenicosanedioic acid (BEA-MalDap2) which is attached to two Fc sequences

SEQ ID NO: 847 - protein, 40 aa, synthetic construct
  SITE 2: note = 2-aminoisobutyric acid
  SITE 6: note = (S)-2-amino-3-(2-fluorophenyl)-2-methylpropanoic acid
  SITE 11: note = Alpha-methyl-L-serine
  SITE 13: note = Alpha-methyl-L-leucine
  SITE 16: note = Ornithine
  SITE 17: note = Lysine is chemically modified through conjugation of the side chain with (2-[2-(2-amino-ethoxy)-ethoxy]-acetyl)2-Gamma-Glutamic acid-CO-(CH2)16-CO2H
  SITE 20: note = Alpha-methyl-L-3-(4-pyridyl)-L-alanine
  SITE 25: note = Alpha-methyl-L-tyrosine
  SITE 29: note = 2-aminoisobutyric acid
  SITE 40: note = Lysine amide is chemically modified through conjugation of the side chain with 24x Polyethylene glycol-(6S,16S)-6,16-bis(aminomethyl)-4,7,15,18-tetraoxo-11 -(4-oxobutanoyl)-5,8,11,14,17-pentaazahenicosanedioic acid (BEA-MalDap2) which is attached to two Fc sequences
YXQGTXTSDYXIXLDXKAQXEFIEXLIEXSPSSGAPPPSK

SEQ ID NO: 848 - protein, 40 aa, synthetic construct
  SITE 2: note = 2-aminoisobutyric acid
  SITE 6: note = (S)-2-amino-3-(2-fluorophenyl)-2-methylpropanoic acid
  SITE 10: note = 3-(4-pyridyl)-L-alanine
  SITE 11: note = Alpha-methyl-L-serine
  SITE 13: note = Alpha-methyl-L-leucine
  SITE 16: note = Ornithine
  SITE 17: note = Lysine is chemically modified through conjugation of the side chain with (2-[2-(2-amino-ethoxy)-ethoxy]-acetyl)2-Gamma-Glutamic acid-CO-(CH2)16-CO2H
  SITE 20: note = Alpha-methyl-L-3-(4-pyridyl)-L-alanine
  SITE 25: note = Alpha-methyl-L-tyrosine
  SITE 29: note = 2-aminoisobutyric acid
  SITE 40: note = Lysine amide is chemically modified through conjugation of the side chain with 24x Polyethylene glycol-(6S,16S)-6,16-bis(aminomethyl)-4,7,15,18-tetraoxo-11 -(4-oxobutanoyl)-5,8,11,14,17-pentaazahenicosanedioic acid (BEA-MalDap2) which is attached to two Fc sequences
YXQGTXTSDXXIXLDXKAQXEFIQXLIEXSPSSGAPPPSK

SEQ ID NO: 849 - protein, 40 aa, synthetic construct
  SITE 2: note = 2-aminoisobutyric acid
  SITE 6: note = (S)-2-amino-3-(2-fluorophenyl)-2-methylpropanoic acid
  SITE 10: note = 3-(4-pyridyl)-L-alanine
  SITE 11: note = Alpha-methyl-L-serine
  SITE 13: note = Alpha-methyl-L-leucine
  SITE 16: note = Ornithine
  SITE 17: note = Lysine is chemically modified through conjugation of the side chain with (2-[2-(2-amino-ethoxy)-ethoxy]-acetyl)2-Gamma-Glutamic acid-CO-(CH2)16-CO2H
  SITE 20: note = Alpha-methyl-L-3-(4-pyridyl)-L-alanine
  SITE 25: note = Alpha-methyl-L-tyrosine
  SITE 29: note = 2-aminoisobutyric acid
  SITE 40: note = Lysine amide is chemically modified through conjugation of the side chain with 24x Polyethylene glycol-(6S,16S)-6,16-bis(aminomethyl)-4,7,15,18-tetraoxo-11 -(4-oxobutanoyl)-5,8,11,14,17-pentaazahenicosanedioic acid (BEA-MalDap2) which is attached to two Fc sequences
YXQGTXTSDXXIXLDXKAQXEFIEXLIEXSPSSGAPPPSK

SEQ ID NO: 850 - protein, 40 aa, synthetic construct; identical to SEQ ID NO: 842
  SITE 2: note = 2-aminoisobutyric acid
  SITE 6: note = (S)-2-amino-3-(2-fluorophenyl)-2-methylpropanoic acid
  SITE 11: note = Alpha-methyl-L-serine
  SITE 13: note = Alpha-methyl-L-leucine
  SITE 16: note = Ornithine
  SITE 17: note = Lysine is chemically modified through conjugation of the side chain with 2-[2-(2-amino-ethoxy)-ethoxy]-acetyl-Gamma-Glutamic acid-CO-(CH2)16-CO2H
  SITE 20: note = Alpha-methyl-L-3-(4-pyridyl)-L-alanine
  SITE 25: note = Alpha-methyl-L-tyrosine
  SITE 29: note = 2-aminoisobutyric acid
  SITE 40: note = Lysine amide is chemically modified through conjugation of the side chain with 24x Polyethylene glycol-(6S,16S)-6,16-bis(aminomethyl)-4,7,15,18-tetraoxo-11 -(4-oxobutanoyl)-5,8,11,14,17-pentaazahenicosanedioic acid (BEA-MalDap2) which is attached to two Fc sequences

SEQ ID NO: 851 - protein, 40 aa, synthetic construct
  SITE 2: note = 2-aminoisobutyric acid
  SITE 6: note = (S)-2-amino-3-(2-fluorophenyl)-2-methylpropanoic acid
  SITE 11: note = Alpha-methyl-L-serine
  SITE 13: note = Alpha-methyl-L-leucine
  SITE 17: note = Lysine is chemically modified through conjugation of the side chain with 2-[2-(2-amino-ethoxy)-ethoxy]-acetyl-Gamma-Glutamic acid-CO-(CH2)16-CO2H
  SITE 20: note = Alpha-methyl-L-3-(4-pyridyl)-L-alanine
  SITE 25: note = Alpha-methyl-L-tyrosine
  SITE 40: note = Lysine amide is chemically modified through conjugation of the side chain with 24x Polyethylene glycol-(6S,16S)-6,16-bis(aminomethyl)-4,7,15,18-tetraoxo-11 -(4-oxobutanoyl)-5,8,11,14,17-pentaazahenicosanedioic acid (BEA-MalDap2) which is attached to two Fc sequences
YXQGTXTSDYXIXLDEKAQXEFIQXLLEGSPSSGAPPPSK

SEQ ID NO: 852 - protein, 40 aa, synthetic construct
  SITE 2: note = 2-aminoisobutyric acid
  SITE 6: note = (S)-2-amino-3-(2-fluorophenyl)-2-methylpropanoic acid
  SITE 11: note = Alpha-methyl-L-serine
  SITE 13: note = Alpha-methyl-L-leucine
  SITE 17: note = Lysine is chemically modified through conjugation of the side chain with 2-[2-(2-amino-ethoxy)-ethoxy]-acetyl-Gamma-Glutamic acid-CO-(CH2)16-CO2H
  SITE 20: note = Alpha-methyl-L-3-(4-pyridyl)-L-alanine
  SITE 25: note = Alpha-methyl-L-tyrosine
  SITE 29: note = 2-aminoisobutyric acid
  SITE 40: note = Lysine amide is chemically modified through conjugation of the side chain with 24x Polyethylene glycol-(6S,16S)-6,16-bis(aminomethyl)-4,7,15,18-tetraoxo-11 -(4-oxobutanoyl)-5,8,11,14,17-pentaazahenicosanedioic acid (BEA-MalDap2) which is attached to two Fc sequences
YXQGTXTSDYXIXLDEKAQXEFIQXLLEXSPSSGAPPPSK

SEQ ID NO: 853 - protein, 40 aa, synthetic construct
  SITE 2: note = 2-aminoisobutyric acid
  SITE 6: note = (S)-2-amino-3-(2-fluorophenyl)-2-methylpropanoic acid
  SITE 11: note = Alpha-methyl-L-serine
  SITE 13: note = Alpha-methyl-L-leucine
  SITE 16: note = Ornithine
  SITE 17: note = Lysine is chemically modified through conjugation of the side chain with (2-[2-(2-amino-ethoxy)-ethoxy]-acetyl)2-Gamma-Glutamic acid-CO-(CH2)16-CO2H
  SITE 20: note = Alpha-methyl-L-3-(4-pyridyl)-L-alanine
  SITE 25: note = Alpha-methyl-L-tyrosine
  SITE 40: note = Lysine amide is chemically modified through conjugation of the side chain with 24x Polyethylene glycol-(6S,16S)-6,16-bis(aminomethyl)-4,7,15,18-tetraoxo-11 -(4-oxobutanoyl)-5,8,11,14,17-pentaazahenicosanedioic acid (BEA-MalDap2) which is attached to two Fc sequences
HXQGTXTSDYXIXLDXKAQXEFIQXLIEGSPSSGAPPPSK

SEQ ID NO: 854 - protein, 40 aa, synthetic construct
  SITE 2: note = 2-aminoisobutyric acid
  SITE 6: note = (S)-2-amino-3-(2-fluorophenyl)-2-methylpropanoic acid
  SITE 11: note = Alpha-methyl-L-serine
  SITE 13: note = Alpha-methyl-L-leucine
  SITE 16: note = Ornithine
  SITE 17: note = Lysine is chemically modified through conjugation of the side chain with (2-[2-(2-amino-ethoxy)-ethoxy]-acetyl)2-Gamma-Glutamic acid-CO-(CH2)16-CO2H
  SITE 20: note = Alpha-methyl-L-3-(4-pyridyl)-L-alanine
  SITE 25: note = Alpha-methyl-L-tyrosine
  SITE 40: note = Lysine amide is chemically modified through conjugation of the side chain with 24x Polyethylene glycol-(6S,16S)-6,16-bis(aminomethyl)-4,7,15,18-tetraoxo-11 -(4-oxobutanoyl)-5,8,11,14,17-pentaazahenicosanedioic acid (BEA-MalDap2) which is attached to two Fc sequences
YXQGTXTSDYXIXLDXKAQXEFIQXLVEGSPSSGAPPPSK

SEQ ID NO: 855 - protein, 47 aa, synthetic construct
  SITE 2: note = 2-aminoisobutyric acid
  SITE 6: note = (S)-2-amino-3-(2-fluorophenyl)-2-methylpropanoic acid
  SITE 11: note = Alpha-methyl-L-serine
  SITE 13: note = Alpha-methyl-L-leucine
  SITE 16: note = Ornithine
  SITE 17: note = Lysine is chemically modified through conjugation of the side chain with (2-[2-(2-amino-ethoxy)-ethoxy]-acetyl)2-Gamma-Glutamic acid-CO-(CH2)16-CO2H
  SITE 20: note = Alpha-methyl-L-3-(4-pyridyl)-L-alanine
  SITE 25: note = Alpha-methyl-L-tyrosine
  SITE 47: note = Lysine amide is chemically modified through conjugation of the side chain with (6S,16S)-6,16-bis(aminomethyl)-4,7,15,18-tetraoxo-11-(4-oxo butanoyl)-5,8,11,14,17-pentaazahenicosanedioic acid (BEA-MalDap2) which is attached to two Fc sequences
YXQGTXTSDYXIXLDXKAQXEFIQXLIEGGGGGGGSGGGGSGGGGSK

SEQ ID NO: 856 - protein, 40 aa, synthetic construct; identical to SEQ ID NO: 828
  SITE 2: note = 2-aminoisobutyric acid
  SITE 6: note = (S)-2-amino-3-(2-fluorophenyl)-2-methylpropanoic acid
  SITE 11: note = Alpha-methyl-L-serine
  SITE 13: note = Alpha-methyl-L-leucine
  SITE 16: note = Ornithine
  SITE 17: note = Lysine is chemically modified through conjugation of the side chain with (2-[2-(2-amino-ethoxy)-ethoxy]-acetyl)2-Gamma-Glutamic acid-CO-(CH2)16-CO2H
  SITE 20: note = Alpha-methyl-L-3-(4-pyridyl)-L-alanine
  SITE 25: note = Alpha-methyl-L-tyrosine
  SITE 40: note = Lysine amide is chemically modified through conjugation of the side chain with (2-[2-(2-amino-ethoxy)-ethoxy]-acetyl)6-(6S,16S)-6,16-bis(a minomethyl)-4,7,15,18-tetraoxo-11-(4-oxobutanoyl)-5,8,11,14 ,17-pentaazahenicosanedioic acid (BEA-MalDap2) which is attached to two Fc sequences

SEQ ID NO: 857 - protein, 40 aa, synthetic construct
  SITE 2: note = 2-aminoisobutyric acid
  SITE 6: note = (S)-2-amino-3-(2-fluorophenyl)-2-methylpropanoic acid
  SITE 11: note = Alpha-methyl-L-serine
  SITE 13: note = Alpha-methyl-L-leucine
  SITE 16: note = Ornithine
  SITE 17: note = Lysine is chemically modified through conjugation of the side chain with (2-[2-(2-amino-ethoxy)-ethoxy]-acetyl)2-Gamma-Glutamic acid-CO-(CH2)16-CO2H
  SITE 20: note = 2-aminoisobutyric acid
  SITE 25: note = Alpha-methyl-L-tyrosine
  SITE 40: note = Lysine amide is chemically modified through conjugation of the side chain with 24x Polyethylene glycol-(6S,16S)-6,16-bis(aminomethyl)-4,7,15,18-tetraoxo-11 -(4-oxobutanoyl)-5,8,11,14,17-pentaazahenicosanedioic acid (BEA-MalDap2) which is attached to two Fc sequences
HXHGTXTSDYXIXLDXKAQXEFIQXLLEGSPSSGAPPPSK

SEQ ID NO: 858 - protein, 40 aa, synthetic construct
  SITE 2: note = 2-aminoisobutyric acid
  SITE 6: note = (S)-2-amino-3-(2-fluorophenyl)-2-methylpropanoic acid
  SITE 10: note = 3-(4-pyridyl)-L-alanine
  SITE 13: note = Alpha-methyl-L-leucine
  SITE 16: note = Ornithine
  SITE 17: note = Lysine is chemically modified through conjugation of the side chain with (2-[2-(2-amino-ethoxy)-ethoxy]-acetyl)2-Gamma-Glutamic acid-CO-(CH2)16-CO2H
  SITE 20: note = Alpha-methyl-L-3-(4-pyridyl)-L-alanine
  SITE 25: note = Alpha-methyl-L-tyrosine
  SITE 40: note = Lysine amide is chemically modified through conjugation of the side chain with 24x Polyethylene glycol-(6S,16S)-6,16-bis(aminomethyl)-4,7,15,18-tetraoxo-11 -(4-oxobutanoyl)-5,8,11,14,17-pentaazahenicosanedioic acid (BEA-MalDap2) which is attached to two Fc sequences
HXHGTXTSDXSIXLDXKAQXEFIQXLLEGSPSSGAPPPSK

SEQ ID NO: 859 - protein, 40 aa, synthetic construct; identical to SEQ ID NO: 827
  SITE 2: note = 2-aminoisobutyric acid
  SITE 6: note = (S)-2-amino-3-(2-fluorophenyl)-2-methylpropanoic acid
  SITE 11: note = Alpha-methyl-L-serine
  SITE 13: note = Alpha-methyl-L-leucine
  SITE 16: note = Ornithine
  SITE 17: note = Lysine is chemically modified through conjugation of the side chain with 2-[2-(2-amino-ethoxy)-ethoxy]-acetyl-Gamma-Glutamic acid-CO-(CH2)16-CO2H
  SITE 20: note = Alpha-methyl-L-3-(4-pyridyl)-L-alanine
  SITE 25: note = Alpha-methyl-L-tyrosine
  SITE 40: note = Lysine amide is chemically modified through conjugation of the side chain with 24x Polyethylene glycol-(6S,16S)-6,16-bis(aminomethyl)-4,7,15,18-tetraoxo-11 -(4-oxobutanoyl)-5,8,11,14,17-pentaazahenicosanedioic acid (BEA-MalDap2) which is attached to two Fc sequences

SEQ ID NO: 860 - protein, 40 aa, synthetic construct; identical to SEQ ID NO: 844
  SITE 2: note = 2-aminoisobutyric acid
  SITE 6: note = (S)-2-amino-3-(2-fluorophenyl)-2-methylpropanoic acid
  SITE 10: note = 3-(4-pyridyl)-L-alanine
  SITE 11: note = Alpha-methyl-L-serine
  SITE 13: note = Alpha-methyl-L-leucine
  SITE 16: note = Ornithine
  SITE 17: note = Lysine is chemically modified through conjugation of the side chain with 2-[2-(2-amino-ethoxy)-ethoxy]-acetyl-Gamma-Glutamic acid-CO-(CH2)16-CO2H
  SITE 20: note = Alpha-methyl-L-3-(4-pyridyl)-L-alanine
  SITE 25: note = Alpha-methyl-L-tyrosine
  SITE 40: note = Lysine amide is chemically modified through conjugation of the side chain with 24x Polyethylene glycol-(6S,16S)-6,16-bis(aminomethyl)-4,7,15,18-tetraoxo-11 -(4-oxobutanoyl)-5,8,11,14,17-pentaazahenicosanedioic acid (BEA-MalDap2) which is attached to two Fc sequences

SEQ ID NO: 861 - protein, 40 aa, synthetic construct
  SITE 2: note = 2-aminoisobutyric acid
  SITE 6: note = (S)-2-amino-3-(2-fluorophenyl)-2-methylpropanoic acid
  SITE 11: note = Alpha-methyl-L-serine
  SITE 13: note = Alpha-methyl-L-leucine
  SITE 16: note = Ornithine
  SITE 17: note = Lysine is chemically modified through conjugation of the side chain with (2-[2-(2-amino-ethoxy)-ethoxy]-acetyl)2-Gamma-Glutamic acid-CO-(CH2)16-CO2H
  SITE 20: note = Alpha-methyl-L-3-(4-pyridyl)-L-alanine
  SITE 25: note = Alpha-methyl-L-tyrosine
  SITE 40: note = Lysine amide is chemically modified through conjugation of the side chain with (2-[2-(2-amino-ethoxy)-ethoxy]-acetyl)6-(6S,16S)-6,16-bis(a minomethyl)-4,7,15,18-tetraoxo-11-(4-oxobutanoyl)-5,8,11,14 ,17-pentaazahenicosanedioic acid (BEA-MalDap2) which is attached to two Fc sequences
YXQGTXTSDYXIXLDXKAQXDFIQXLIEGSPSSGAPPPSK

SEQ ID NO: 862 - protein, 40 aa, synthetic construct
  SITE 2: note = 2-aminoisobutyric acid
  SITE 6: note = (S)-2-amino-3-(2-fluorophenyl)-2-methylpropanoic acid
  SITE 11: note = Alpha-methyl-L-serine
  SITE 13: note = Alpha-methyl-L-leucine
  SITE 16: note = Ornithine
  SITE 17: note = Lysine is chemically modified through conjugation of the side chain with (2-[2-(2-amino-ethoxy)-ethoxy]-acetyl)2-Gamma-Glutamic acid-CO-(CH2)16-CO2H
  SITE 20: note = Alpha-methyl-L-3-(4-pyridyl)-L-alanine
  SITE 21: note = Ornithine
  SITE 25: note = Alpha-methyl-L-tyrosine
  SITE 29: note = 2-aminoisobutyric acid
  SITE 40: note = Lysine amide is chemically modified through conjugation of the side chain with (2-[2-(2-amino-ethoxy)-ethoxy]-acetyl)6-(6S,16S)-6,16-bis(a minomethyl)-4,7,15,18-tetraoxo-11-(4-oxobutanoyl)-5,8,11,14 ,17-pentaazahenicosanedioic acid (BEA-MalDap2) which is attached to two Fc sequences
YXQGTXTSDYXIXLDXKAQXXFIEXLIAXSPSSGAPPPSK

SEQ ID NO: 863 - protein, 40 aa, synthetic construct; identical to SEQ ID NO: 830
  SITE 2: note = 2-aminoisobutyric acid
  SITE 6: note = (S)-2-amino-3-(2-fluorophenyl)-2-methylpropanoic acid
  SITE 11: note = Alpha-methyl-L-serine
  SITE 13: note = Alpha-methyl-L-leucine
  SITE 16: note = Ornithine
  SITE 17: note = Lysine is chemically modified through conjugation of the side chain with (2-[2-(2-amino-ethoxy)-ethoxy]-acetyl)2-Gamma-Glutamic acid-CO-(CH2)16-CO2H
  SITE 20: note = Alpha-methyl-L-3-(4-pyridyl)-L-alanine
  SITE 25: note = Alpha-methyl-L-tyrosine
  SITE 40: note = Lysine amide is chemically modified through conjugation of the side chain with (2-[2-(2-amino-ethoxy)-ethoxy]-acetyl)6-(6S,16S)-6,16-bis(a minomethyl)-4,7,15,18-tetraoxo-11-(4-oxobutanoyl)-5,8,11,14 ,17-pentaazahenicosanedioic acid (BEA-MalDap2) which is attached to two Fc sequences

SEQ ID NO: 864 - protein, 40 aa, synthetic construct
  SITE 2: note = 2-aminoisobutyric acid
  SITE 6: note = (S)-2-amino-3-(2-fluorophenyl)-2-methylpropanoic acid
  SITE 11: note = Alpha-methyl-L-serine
  SITE 13: note = Alpha-methyl-L-leucine
  SITE 16: note = Ornithine
  SITE 17: note = Lysine is chemically modified through conjugation of the side chain with (2-[2-(2-amino-ethoxy)-ethoxy]-acetyl)2-Gamma-Glutamic acid-CO-(CH2)16-CO2H
  SITE 20: note = Alpha-methyl-L-3-(4-pyridyl)-L-alanine
  SITE 25: note = Alpha-methyl-L-tyrosine
  SITE 29: note = 2-aminoisobutyric acid
  SITE 40: note = Lysine amide is chemically modified through conjugation of the side chain with (2-[2-(2-amino-ethoxy)-ethoxy]-acetyl)6-(6S,16S)-6,16-bis(a minomethyl)-4,7,15,18-tetraoxo-11-(4-oxobutanoyl)-5,8,11,14 ,17-pentaazahenicosanedioic acid (BEA-MalDap2) which is attached to two Fc sequences
YXQGTXTSDYXIXLDXKAQXEFIQXLLEXSPSSGAPPPSK

SEQ ID NO: 865 - protein, 40 aa, synthetic construct
  SITE 2: note = 2-aminoisobutyric acid
  SITE 6: note = (S)-2-amino-3-(2-fluorophenyl)-2-methylpropanoic acid
  SITE 11: note = Alpha-methyl-L-serine
  SITE 13: note = Alpha-methyl-L-leucine
  SITE 16: note = Ornithine
  SITE 20: note = Alpha-methyl-L-3-(4-pyridyl)-L-alanine
  SITE 25: note = Alpha-methyl-L-tyrosine
  SITE 40: note = Lysine amide is chemically modified through conjugation of the side chain with 24x Polyethylene glycol-(6S,16S)-6,16-bis(aminomethyl)-4,7,15,18-tetraoxo-11 -(4-oxobutanoyl)-5,8,11,14,17-pentaazahenicosanedioic acid (BEA-MalDap2) which is attached to two Fc sequences
HXQGTXTSDYXIXLDXKAQXEFIEXLIEGSPSSGAPPPSK

SEQ ID NO: 866 - protein, 40 aa, synthetic construct
  SITE 2: note = 2-aminoisobutyric acid
  SITE 6: note = (S)-2-amino-3-(2-fluorophenyl)-2-methylpropanoic acid
  SITE 11: note = Alpha-methyl-L-serine
  SITE 13: note = Alpha-methyl-L-leucine
  SITE 16: note = Ornithine
  SITE 17: note = Lysine is chemically modified through conjugation of the side chain with (2-[2-(2-amino-ethoxy)-ethoxy]-acetyl)2-Gamma-Glutamic acid-CO-(CH2)16-CO2H
  SITE 20: note = Alpha-methyl-L-3-(4-pyridyl)-L-alanine
  SITE 25: note = Alpha-methyl-L-tyrosine
  SITE 29: note = 2-aminoisobutyric acid
  SITE 40: note = Lysine amide is chemically modified through conjugation of the side chain with 24x Polyethylene glycol-(6S,16S)-6,16-bis(aminomethyl)-4,7,15,18-tetraoxo-11 -(4-oxobutanoyl)-5,8,11,14,17-pentaazahenicosanedioic acid (BEA-MalDap2) which is attached to two Fc sequences
HXQGTXTSDYXIXLDXKAQXEFIEXLIEXSPSSGAPPPSK

SEQ ID NO: 867 - protein, 40 aa, synthetic construct
  SITE 2: note = 2-aminoisobutyric acid
  SITE 6: note = (S)-2-amino-3-(2-fluorophenyl)-2-methylpropanoic acid
  SITE 11: note = Alpha-methyl-L-serine
  SITE 13: note = Alpha-methyl-L-leucine
  SITE 16: note = Ornithine
  SITE 17: note = Lysine is chemically modified through conjugation of the side chain with (2-[2-(2-amino-ethoxy)-ethoxy]-acetyl)2-Gamma-Glutamic acid-CO-(CH2)16-CO2H
  SITE 20: note = Alpha-methyl-L-3-(4-pyridyl)-L-alanine
  SITE 25: note = Alpha-methyl-L-tyrosine
  SITE 40: note = Lysine amide is chemically modified through conjugation of the side chain with 24x Polyethylene glycol-(6S,16S)-6,16-bis(aminomethyl)-4,7,15,18-tetraoxo-11 -(4-oxobutanoyl)-5,8,11,14,17-pentaazahenicosanedioic acid (BEA-MalDap2) which is attached to two Fc sequences
HXQGTXTSDYXIXLDXKAQXEFIEXLLEGSPSSGAPPPSK

SEQ ID NO: 868 - protein, 40 aa, synthetic construct
  SITE 2: note = 2-aminoisobutyric acid
  SITE 6: note = (S)-2-amino-3-(2-fluorophenyl)-2-methylpropanoic acid
  SITE 11: note = Alpha-methyl-L-serine
  SITE 13: note = Alpha-methyl-L-leucine
  SITE 16: note = Ornithine
  SITE 17: note = Lysine is chemically modified through conjugation of the side chain with (2-[2-(2-amino-ethoxy)-ethoxy]-acetyl)2-Gamma-Glutamic acid-CO-(CH2)16-CO2H
  SITE 20: note = Alpha-methyl-L-3-(4-pyridyl)-L-alanine
  SITE 25: note = Alpha-methyl-L-tyrosine
  SITE 29: note = 2-aminoisobutyric acid
  SITE 40: note = Lysine amide is chemically modified through conjugation of the side chain with 24x Polyethylene glycol-(6S,16S)-6,16-bis(aminomethyl)-4,7,15,18-tetraoxo-11 -(4-oxobutanoyl)-5,8,11,14,17-pentaazahenicosanedioic acid (BEA-MalDap2) which is attached to two Fc sequences
HXQGTXTSDYXIXLDXKAQXEFIEXLLEXSPSSGAPPPSK

SEQ ID NO: 869 - protein, 40 aa, synthetic construct; identical to SEQ ID NO: 865
  SITE 2: note = 2-aminoisobutyric acid
  SITE 6: note = (S)-2-amino-3-(2-fluorophenyl)-2-methylpropanoic acid
  SITE 11: note = Alpha-methyl-L-serine
  SITE 13: note = Alpha-methyl-L-leucine
  SITE 16: note = Ornithine
  SITE 17: note = Lysine is chemically modified through conjugation of the side chain with 2-[2-(2-amino-ethoxy)-ethoxy]-acetyl-Gamma-Glutamic acid-CO-(CH2)16-CO2H
  SITE 20: note = Alpha-methyl-L-3-(4-pyridyl)-L-alanine
  SITE 25: note = Alpha-methyl-L-tyrosine
  SITE 40: note = Lysine amide is chemically modified through conjugation of the side chain with 24x Polyethylene glycol-(6S,16S)-6,16-bis(aminomethyl)-4,7,15,18-tetraoxo-11 -(4-oxobutanoyl)-5,8,11,14,17-pentaazahenicosanedioic acid (BEA-MalDap2) which is attached to two Fc sequences

SEQ ID NO: 870 - protein, 40 aa, synthetic construct; identical to SEQ ID NO: 866
  SITE 2: note = 2-aminoisobutyric acid
  SITE 6: note = (S)-2-amino-3-(2-fluorophenyl)-2-methylpropanoic acid
  SITE 11: note = Alpha-methyl-L-serine
  SITE 13: note = Alpha-methyl-L-leucine
  SITE 16: note = Ornithine
  SITE 17: note = Lysine is chemically modified through conjugation of the side chain with 2-[2-(2-amino-ethoxy)-ethoxy]-acetyl-Gamma-Glutamic acid-CO-(CH2)16-CO2H
  SITE 20: note = Alpha-methyl-L-3-(4-pyridyl)-L-alanine
  SITE 25: note = Alpha-methyl-L-tyrosine
  SITE 29: note = 2-aminoisobutyric acid
  SITE 40: note = Lysine amide is chemically modified through conjugation of the side chain with 24x Polyethylene glycol-(6S,16S)-6,16-bis(aminomethyl)-4,7,15,18-tetraoxo-11 -(4-oxobutanoyl)-5,8,11,14,17-pentaazahenicosanedioic acid (BEA-MalDap2) which is attached to two Fc sequences

SEQ ID NO: 871 - protein, 40 aa, synthetic construct; identical to SEQ ID NO: 867
  SITE 2: note = 2-aminoisobutyric acid
  SITE 6: note = (S)-2-amino-3-(2-fluorophenyl)-2-methylpropanoic acid
  SITE 11: note = Alpha-methyl-L-serine
  SITE 13: note = Alpha-methyl-L-leucine
  SITE 16: note = Ornithine
  SITE 17: note = Lysine is chemically modified through conjugation of the side chain with 2-[2-(2-amino-ethoxy)-ethoxy]-acetyl-Gamma-Glutamic acid-CO-(CH2)16-CO2H
  SITE 20: note = Alpha-methyl-L-3-(4-pyridyl)-L-alanine
  SITE 25: note = Alpha-methyl-L-tyrosine
  SITE 40: note = Lysine amide is chemically modified through conjugation of the side chain with 24x Polyethylene glycol-(6S,16S)-6,16-bis(aminomethyl)-4,7,15,18-tetraoxo-11 -(4-oxobutanoyl)-5,8,11,14,17-pentaazahenicosanedioic acid (BEA-MalDap2) which is attached to two Fc sequences

SEQ ID NO: 872 - protein, 40 aa, synthetic construct
  SITE 2: note = 2-aminoisobutyric acid
  SITE 6: note = (S)-2-amino-3-(2-fluorophenyl)-2-methylpropanoic acid
  SITE 11: note = Alpha-methyl-L-serine
  SITE 13: note = Alpha-methyl-L-leucine
  SITE 16: note = Ornithine
  SITE 17: note = Lysine is chemically modified through conjugation of the side chain with (2-[2-(2-amino-ethoxy)-ethoxy]-acetyl)2-Gamma-Glutamic acid-CO-(CH2)16-CO2H
  SITE 20: note = Alpha-methyl-L-3-(4-pyridyl)-L-alanine
  SITE 25: note = Alpha-methyl-L-tyrosine
  SITE 29: note = 2-aminoisobutyric acid
  SITE 40: note = Lysine amide is chemically modified through conjugation of the side chain with 24x Polyethylene glycol-(6S,16S)-6,16-bis(aminomethyl)-4,7,15,18-tetraoxo-11 -(4-oxobutanoyl)-5,8,11,14,17-pentaazahenicosanedioic acid (BEA-MalDap2) which is attached to two Fc sequences
HXQGTXTSDYXIXLDXKAQXEFIQXLIEXSPSSGAPPPSK

SEQ ID NO: 873 - protein, 40 aa, synthetic construct
  SITE 2: note = 2-aminoisobutyric acid
  SITE 6: note = (S)-2-amino-3-(2-fluorophenyl)-2-methylpropanoic acid
  SITE 11: note = Alpha-methyl-L-serine
  SITE 13: note = Alpha-methyl-L-leucine
  SITE 16: note = Ornithine
  SITE 17: note = Lysine is chemically modified through conjugation of the side chain with (2-[2-(2-amino-ethoxy)-ethoxy]-acetyl)2-Gamma-Glutamic acid-CO-(CH2)16-CO2H
  SITE 20: note = Alpha-methyl-L-3-(4-pyridyl)-L-alanine
  SITE 25: note = Alpha-methyl-L-tyrosine
  SITE 29: note = 2-aminoisobutyric acid
  SITE 40: note = Lysine amide is chemically modified through conjugation of the side chain with 24x Polyethylene glycol-(6S,16S)-6,16-bis(aminomethyl)-4,7,15,18-tetraoxo-11 -(4-oxobutanoyl)-5,8,11,14,17-pentaazahenicosanedioic acid (BEA-MalDap2) which is attached to two Fc sequences
HXQGTXTSDYXIXLDXKAQXEFIQXLLEXSPSSGAPPPSK

SEQ ID NO: 874 - protein, 40 aa, synthetic construct; identical to SEQ ID NO: 872
  SITE 2: note = 2-aminoisobutyric acid
  SITE 6: note = (S)-2-amino-3-(2-fluorophenyl)-2-methylpropanoic acid
  SITE 11: note = Alpha-methyl-L-serine
  SITE 13: note = Alpha-methyl-L-leucine
  SITE 16: note = Ornithine
  SITE 17: note = Lysine is chemically modified through conjugation of the side chain with 2-[2-(2-amino-ethoxy)-ethoxy]-acetyl-Gamma-Glutamic acid-CO-(CH2)16-CO2H
  SITE 20: note = Alpha-methyl-L-3-(4-pyridyl)-L-alanine
  SITE 25: note = Alpha-methyl-L-tyrosine
  SITE 29: note = 2-aminoisobutyric acid
  SITE 40: note = Lysine amide is chemically modified through conjugation of the side chain with 24x Polyethylene glycol-(6S,16S)-6,16-bis(aminomethyl)-4,7,15,18-tetraoxo-11 -(4-oxobutanoyl)-5,8,11,14,17-pentaazahenicosanedioic acid (BEA-MalDap2) which is attached to two Fc sequences

SEQ ID NO: 875 - protein, 40 aa, synthetic construct; identical to SEQ ID NO: 873
  SITE 2: note = 2-aminoisobutyric acid
  SITE 6: note = (S)-2-amino-3-(2-fluorophenyl)-2-methylpropanoic acid
  SITE 11: note = Alpha-methyl-L-serine
  SITE 13: note = Alpha-methyl-L-leucine
  SITE 16: note = Ornithine
  SITE 17: note = Lysine is chemically modified through conjugation of the side chain with 2-[2-(2-amino-ethoxy)-ethoxy]-acetyl-Gamma-Glutamic acid-CO-(CH2)16-CO2H
  SITE 20: note = Alpha-methyl-L-3-(4-pyridyl)-L-alanine
  SITE 25: note = Alpha-methyl-L-tyrosine
  SITE 29: note = 2-aminoisobutyric acid
  SITE 40: note = Lysine amide is chemically modified through conjugation of the side chain with 24x Polyethylene glycol-(6S,16S)-6,16-bis(aminomethyl)-4,7,15,18-tetraoxo-11 -(4-oxobutanoyl)-5,8,11,14,17-pentaazahenicosanedioic acid (BEA-MalDap2) which is attached to two Fc sequences

SEQ ID NO: 876 - protein, 40 aa, synthetic construct; identical to SEQ ID NO: 827
  SITE 2: note = Alpha-methyl-L-serine
  SITE 6: note = (S)-2-amino-3-(2-fluorophenyl)-2-methylpropanoic acid
  SITE 11: note = Alpha-methyl-L-serine
  SITE 13: note = Alpha-methyl-L-leucine
  SITE 16: note = Ornithine
  SITE 17: note = Lysine is chemically modified through conjugation of the side chain with 2-[2-(2-amino-ethoxy)-ethoxy]-acetyl-Gamma-Glutamic acid-CO-(CH2)16-CO2H
  SITE 20: note = Alpha-methyl-L-3-(4-pyridyl)-L-alanine
  SITE 25: note = Alpha-methyl-L-tyrosine
  SITE 40: note = Lysine amide is chemically modified through conjugation of the side chain with 24x Polyethylene glycol-(6S,16S)-6,16-bis(aminomethyl)-4,7,15,18-tetraoxo-11 -(4-oxobutanoyl)-5,8,11,14,17-pentaazahenicosanedioic acid (BEA-MalDap2) which is attached to two Fc sequences

SEQ ID NO: 877 - protein, 40 aa, synthetic construct; identical to SEQ ID NO: 827
  SITE 2: note = L-isovaline
  SITE 6: note = (S)-2-amino-3-(2-fluorophenyl)-2-methylpropanoic acid
  SITE 11: note = Alpha-methyl-L-serine
  SITE 13: note = Alpha-methyl-L-leucine
  SITE 16: note = Ornithine
  SITE 17: note = Lysine is chemically modified through conjugation of the side chain with 2-[2-(2-amino-ethoxy)-ethoxy]-acetyl-Gamma-Glutamic acid-CO-(CH2)16-CO2H
  SITE 20: note = Alpha-methyl-L-3-(4-pyridyl)-L-alanine
  SITE 25: note = Alpha-methyl-L-tyrosine
  SITE 40: note = Lysine amide is chemically modified through conjugation of the side chain with 24x Polyethylene glycol-(6S,16S)-6,16-bis(aminomethyl)-4,7,15,18-tetraoxo-11 -(4-oxobutanoyl)-5,8,11,14,17-pentaazahenicosanedioic acid (BEA-MalDap2) which is attached to two Fc sequences

SEQ ID NO: 878 - protein, 40 aa, synthetic construct; identical to SEQ ID NO: 827
  SITE 2: note = 1-Aminocyclobutane-1-carboxylic acid
  SITE 6: note = (S)-2-amino-3-(2-fluorophenyl)-2-methylpropanoic acid
  SITE 11: note = Alpha-methyl-L-serine
  SITE 13: note = Alpha-methyl-L-leucine
  SITE 16: note = Ornithine
  SITE 17: note = Lysine is chemically modified through conjugation of the side chain with 2-[2-(2-amino-ethoxy)-ethoxy]-acetyl-Gamma-Glutamic acid-CO-(CH2)16-CO2H
  SITE 20: note = Alpha-methyl-L-3-(4-pyridyl)-L-alanine
  SITE 25: note = Alpha-methyl-L-tyrosine
  SITE 40: note = Lysine amide is chemically modified through conjugation of the side chain with 24x Polyethylene glycol-(6S,16S)-6,16-bis(aminomethyl)-4,7,15,18-tetraoxo-11 -(4-oxobutanoyl)-5,8,11,14,17-pentaazahenicosanedioic acid (BEA-MalDap2) which is attached to two Fc sequences

SEQ ID NO: 879 - protein, 39 aa, synthetic construct; identical to SEQ ID NO: 153
  SITE 2: note = 2-aminoisobutyric acid
  SITE 6: note = (S)-2-amino-3-(2-fluorophenyl)-2-methylpropanoic acid
  SITE 11: note = Alpha-methyl-L-serine
  SITE 13: note = Alpha-methyl-L-leucine
  SITE 16: note = Ornithine
  SITE 17: note = Lysine is chemically modified through conjugation of the side chain with 2-[2-(2-amino-ethoxy)-ethoxy]-acetyl-Gamma-Glutamic acid-CO-(CH2)16-CO2H
  SITE 20: note = Alpha-methyl-L-3-(4-pyridyl)-L-alanine
  SITE 21: note = Ornithine
  SITE 24: note = Lysine is chemically modified through conjugation of the side chain with 24x Polyethylene glycol-(6S,16S)-6,16-bis(aminomethyl)-4,7,15,18-tetraoxo-11 -(4-oxobutanoyl)-5,8,11,14,17-pentaazahenicosanedioic acid (BEA-MalDap2) which is attached to two Fc sequences
  SITE 25: note = Alpha-methyl-L-tyrosine
  SITE 39: note = Amidated Serine

SEQ ID NO: 880 - protein, 39 aa, synthetic construct; identical to SEQ ID NO: 154
  SITE 2: note = 2-aminoisobutyric acid
  SITE 6: note = (S)-2-amino-3-(2-fluorophenyl)-2-methylpropanoic acid
  SITE 11: note = Alpha-methyl-L-serine
  SITE 13: note = Alpha-methyl-L-leucine
  SITE 16: note = Ornithine
  SITE 17: note = Lysine is chemically modified through conjugation of the side chain with 2-[2-(2-amino-ethoxy)-ethoxy]-acetyl-Gamma-Glutamic acid-CO-(CH2)16-CO2H
  SITE 20: note = Alpha-methyl-L-3-(4-pyridyl)-L-alanine
  SITE 24: note = Lysine is chemically modified through conjugation of the side chain with 24x Polyethylene glycol-(6S,16S)-6,16-bis(aminomethyl)-4,7,15,18-tetraoxo-11 -(4-oxobutanoyl)-5,8,11,14,17-pentaazahenicosanedioic acid (BEA-MalDap2) which is attached to two Fc sequences
  SITE 25: note = Alpha-methyl-L-tyrosine
  SITE 39: note = Amidated Serine

SEQ ID NO: 881 - protein, 40 aa, synthetic construct
  SITE 2: note = 2-aminoisobutyric acid
  SITE 6: note = (S)-2-amino-3-(2-fluorophenyl)-2-methylpropanoic acid
  SITE 11: note = Alpha-methyl-L-serine
  SITE 13: note = Alpha-methyl-L-leucine
  SITE 16: note = Ornithine
  SITE 17: note = Lysine is chemically modified through conjugation of the side chain with 2-[2-(2-amino-ethoxy)-ethoxy]-acetyl-Gamma-Glutamic acid-CO-(CH2)16-CO2H
  SITE 20: note = Alpha-methyl-L-3-(4-pyridyl)-L-alanine
  SITE 21: note = Ornithine
  SITE 24: note = D-Glutamic acid
  SITE 25: note = Alpha-methyl-L-tyrosine
  SITE 40: note = Lysine amide is chemically modified through conjugation of the side chain with 24x Polyethylene glycol-(6S,16S)-6,16-bis(aminomethyl)-4,7,15,18-tetraoxo-11 -(4-oxobutanoyl)-5,8,11,14,17-pentaazahenicosanedioic acid (BEA-MalDap2) which is attached to two Fc sequences
HXQGTXTSDYXIXLDXKAQXXFIEXLIEGSPSSGAPPPSK

SEQ ID NO: 882 - protein, 40 aa, synthetic construct
  SITE 2: note = 2-aminoisobutyric acid
  SITE 6: note = (S)-2-amino-3-(2-fluorophenyl)-2-methylpropanoic acid
  SITE 11: note = Alpha-methyl-L-serine
  SITE 13: note = Alpha-methyl-L-leucine
  SITE 16: note = Ornithine
  SITE 17: note = Lysine is chemically modified through conjugation of the side chain with 2-[2-(2-amino-ethoxy)-ethoxy]-acetyl-Gamma-Glutamic acid-CO-(CH2)16-CO2H
  SITE 20: note = Alpha-methyl-L-3-(4-pyridyl)-L-alanine
  SITE 21: note = Ornithine
  SITE 24: note = D-Glutamic acid
  SITE 25: note = Alpha-methyl-L-tyrosine
  SITE 40: note = Lysine amide is chemically modified through conjugation of the side chain with 24x Polyethylene glycol-(6S,16S)-6,16-bis(aminomethyl)-4,7,15,18-tetraoxo-11 -(4-oxobutanoyl)-5,8,11,14,17-pentaazahenicosanedioic acid (BEA-MalDap2) which is attached to two Fc sequences
HXQGTXTSDYXIXLDXKAQXXFIEXLLEGSPSSGAPPPSK

SEQ ID NO: 883 - protein, 40 aa, synthetic construct; identical to SEQ ID NO: 881
  SITE 2: note = 2-aminoisobutyric acid
  SITE 6: note = (S)-2-amino-3-(2-fluorophenyl)-2-methylpropanoic acid
  SITE 11: note = Alpha-methyl-L-serine
  SITE 13: note = Alpha-methyl-L-leucine
  SITE 16: note = Ornithine
  SITE 17: note = Lysine is chemically modified through conjugation of the side chain with 2-[2-(2-amino-ethoxy)-ethoxy]-acetyl-Gamma-Glutamic acid-CO-(CH2)16-CO2H
  SITE 20: note = Alpha-methyl-L-3-(4-pyridyl)-L-alanine
  SITE 21: note = Ornithine
  SITE 25: note = Alpha-methyl-L-tyrosine
  SITE 40: note = Lysine amide is chemically modified through conjugation of the side chain with 24x Polyethylene glycol-(6S,16S)-6,16-bis(aminomethyl)-4,7,15,18-tetraoxo-11 -(4-oxobutanoyl)-5,8,11,14,17-pentaazahenicosanedioic acid (BEA-MalDap2) which is attached to two Fc sequences

SEQ ID NO: 884 - protein, 40 aa, synthetic construct; identical to SEQ ID NO: 882
  SITE 2: note = 2-aminoisobutyric acid
  SITE 6: note = (S)-2-amino-3-(2-fluorophenyl)-2-methylpropanoic acid
  SITE 11: note = Alpha-methyl-L-serine
  SITE 13: note = Alpha-methyl-L-leucine
  SITE 16: note = Ornithine
  SITE 17: note = Lysine is chemically modified through conjugation of the side chain with 2-[2-(2-amino-ethoxy)-ethoxy]-acetyl-Gamma-Glutamic acid-CO-(CH2)16-CO2H
  SITE 20: note = Alpha-methyl-L-3-(4-pyridyl)-L-alanine
  SITE 21: note = Ornithine
  SITE 25: note = Alpha-methyl-L-tyrosine
  SITE 40: note = Lysine amide is chemically modified through conjugation of the side chain with 24x Polyethylene glycol-(6S,16S)-6,16-bis(aminomethyl)-4,7,15,18-tetraoxo-11 -(4-oxobutanoyl)-5,8,11,14,17-pentaazahenicosanedioic acid (BEA-MalDap2) which is attached to two Fc sequences

SEQ ID NO: 885 - protein, 40 aa, synthetic construct
  SITE 2: note = 2-aminoisobutyric acid
  SITE 6: note = (S)-2-amino-3-(2-fluorophenyl)-2-methylpropanoic acid
  SITE 11: note = Alpha-methyl-L-serine
  SITE 13: note = Alpha-methyl-L-leucine
  SITE 16: note = Ornithine
  SITE 17: note = Lysine is chemically modified through conjugation of the side chain with 2-[2-(2-amino-ethoxy)-ethoxy]-acetyl-Gamma-Glutamic acid-CO-(CH2)16-CO2H
  SITE 20: note = Alpha-methyl-L-3-(4-pyridyl)-L-alanine
  SITE 25: note = Alpha-methyl-L-tyrosine
  SITE 40: note = Lysine amide is chemically modified through conjugation of the side chain with 24x Polyethylene glycol-(6S,16S)-6,16-bis(aminomethyl)-4,7,15,18-tetraoxo-11 -(4-oxobutanoyl)-5,8,11,14,17-pentaazahenicosanedioic acid (BEA-MalDap2) which is attached to two Fc sequences
YXQGTXTSDYXIXLDXKAQXEFIEXLLEGSPSSGAPPPSK

SEQ ID NO: 886 - protein, 40 aa, synthetic construct; identical to SEQ ID NO: 885
  SITE 2: note = 2-aminoisobutyric acid
  SITE 6: note = (S)-2-amino-3-(2-fluorophenyl)-2-methylpropanoic acid
  SITE 11: note = Alpha-methyl-L-serine
  SITE 13: note = Alpha-methyl-L-leucine
  SITE 16: note = Ornithine
  SITE 17: note = Lysine is chemically modified through conjugation of the side chain with 2-[2-(2-amino-ethoxy)-ethoxy]-acetyl-Gamma-Glutamic acid-CO-(CH2)16-CO2H
  SITE 20: note = Alpha-methyl-L-3-(4-pyridyl)-L-alanine
  SITE 24: note = D-Glutamic acid
  SITE 25: note = Alpha-methyl-L-tyrosine
  SITE 40: note = Lysine amide is chemically modified through conjugation of the side chain with 24x Polyethylene glycol-(6S,16S)-6,16-bis(aminomethyl)-4,7,15,18-tetraoxo-11 -(4-oxobutanoyl)-5,8,11,14,17-pentaazahenicosanedioic acid (BEA-MalDap2) which is attached to two Fc sequences

SEQ ID NO: 887 - protein, 40 aa, synthetic construct
  SITE 2: note = 2-aminoisobutyric acid
  SITE 6: note = (S)-2-amino-3-(2-fluorophenyl)-2-methylpropanoic acid
  SITE 11: note = Alpha-methyl-L-serine
  SITE 13: note = Alpha-methyl-L-leucine
  SITE 16: note = Ornithine
  SITE 17: note = Lysine is chemically modified through conjugation of the side chain with 2-[2-(2-amino-ethoxy)-ethoxy]-acetyl-Gamma-Glutamic acid-CO-(CH2)16-CO2H
  SITE 20: note = Alpha-methyl-L-3-(4-pyridyl)-L-alanine
  SITE 21: note = Ornithine
  SITE 25: note = Alpha-methyl-L-tyrosine
  SITE 40: note = Lysine amide is chemically modified through conjugation of the side chain with 24x Polyethylene glycol-(6S,16S)-6,16-bis(aminomethyl)-4,7,15,18-tetraoxo-11 -(4-oxobutanoyl)-5,8,11,14,17-pentaazahenicosanedioic acid (BEA-MalDap2) which is attached to two Fc sequences
YXQGTXTSDYXIXLDXKAQXXFIEXLLEGSPSSGAPPPSK

SEQ ID NO: 888 - protein, 40 aa, synthetic construct; identical to SEQ ID NO: 887
  SITE 2: note = 2-aminoisobutyric acid
  SITE 6: note = (S)-2-amino-3-(2-fluorophenyl)-2-methylpropanoic acid
  SITE 11: note = Alpha-methyl-L-serine
  SITE 13: note = Alpha-methyl-L-leucine
  SITE 16: note = Ornithine
  SITE 17: note = Lysine is chemically modified through conjugation of the side chain with 2-[2-(2-amino-ethoxy)-ethoxy]-acetyl-Gamma-Glutamic acid-CO-(CH2)16-CO2H
  SITE 20: note = Alpha-methyl-L-3-(4-pyridyl)-L-alanine
  SITE 21: note = Ornithine
  SITE 24: note = D-Glutamic acid
  SITE 25: note = Alpha-methyl-L-tyrosine
  SITE 40: note = Lysine amide is chemically modified through conjugation of the side chain with 24x Polyethylene glycol-(6S,16S)-6,16-bis(aminomethyl)-4,7,15,18-tetraoxo-11 -(4-oxobutanoyl)-5,8,11,14,17-pentaazahenicosanedioic acid (BEA-MalDap2) which is attached to two Fc sequences

SEQ ID NO: 889 - protein, 40 aa, synthetic construct; identical to SEQ ID NO: 827
  SITE 2: note = 2-aminoisobutyric acid
  SITE 6: note = (S)-2-amino-3-(2-fluorophenyl)-2-methylpropanoic acid
  SITE 11: note = Alpha-methyl-L-serine
  SITE 13: note = Alpha-methyl-L-leucine
  SITE 16: note = Ornithine
  SITE 17: note = Lysine is chemically modified through conjugation of the side chain with 2-[2-(2-amino-ethoxy)-ethoxy]-acetyl-Gamma-Glutamic acid-CO-(CH2)16-CO2H
  SITE 20: note = Alpha-methyl-L-3-(4-pyridyl)-L-alanine
  SITE 24: note = D-Glutamic acid
  SITE 25: note = Alpha-methyl-L-tyrosine
  SITE 40: note = Lysine amide is chemically modified through conjugation of the side chain with 24x Polyethylene glycol-(6S,16S)-6,16-bis(aminomethyl)-4,7,15,18-tetraoxo-11 -(4-oxobutanoyl)-5,8,11,14,17-pentaazahenicosanedioic acid (BEA-MalDap2) which is attached to two Fc sequences

SEQ ID NO: 890 - protein, 40 aa, synthetic construct; identical to SEQ ID NO: 792
  SITE 2: note = 2-aminoisobutyric acid
  SITE 6: note = (S)-2-amino-3-(2-fluorophenyl)-2-methylpropanoic acid
  SITE 11: note = Alpha-methyl-L-serine
  SITE 13: note = Alpha-methyl-L-leucine
  SITE 16: note = Ornithine
  SITE 17: note = Lysine is chemically modified through conjugation of the side chain with 2-[2-(2-amino-ethoxy)-ethoxy]-acetyl-Gamma-Glutamic acid-CO-(CH2)16-CO2H
  SITE 20: note = Alpha-methyl-L-3-(4-pyridyl)-L-alanine
  SITE 21: note = Ornithine
  SITE 25: note = Alpha-methyl-L-tyrosine
  SITE 40: note = Lysine amide is chemically modified through conjugation of the side chain with 24x Polyethylene glycol-(6S,16S)-6,16-bis(aminomethyl)-4,7,15,18-tetraoxo-11 -(4-oxobutanoyl)-5,8,11,14,17-pentaazahenicosanedioic acid (BEA-MalDap2) which is attached to two Fc sequences

SEQ ID NO: 891 - protein, 40 aa, synthetic construct; identical to SEQ ID NO: 792
  SITE 2: note = 2-aminoisobutyric acid
  SITE 6: note = (S)-2-amino-3-(2-fluorophenyl)-2-methylpropanoic acid
  SITE 11: note = Alpha-methyl-L-serine
  SITE 13: note = Alpha-methyl-L-leucine
  SITE 16: note = Ornithine
  SITE 17: note = Lysine is chemically modified through conjugation of the side chain with 2-[2-(2-amino-ethoxy)-ethoxy]-acetyl-Gamma-Glutamic acid-CO-(CH2)16-CO2H
  SITE 20: note = Alpha-methyl-L-3-(4-pyridyl)-L-alanine
  SITE 21: note = Ornithine
  SITE 24: note = D-Glutamic acid
  SITE 25: note = Alpha-methyl-L-tyrosine
  SITE 40: note = Lysine amide is chemically modified through conjugation of the side chain with 24x Polyethylene glycol-(6S,16S)-6,16-bis(aminomethyl)-4,7,15,18-tetraoxo-11 -(4-oxobutanoyl)-5,8,11,14,17-pentaazahenicosanedioic acid (BEA-MalDap2) which is attached to two Fc sequences

SEQ ID NO: 892 - protein, 40 aa, synthetic construct
  SITE 2: note = 2-aminoisobutyric acid
  SITE 6: note = (S)-2-amino-3-(2-fluorophenyl)-2-methylpropanoic acid
  SITE 11: note = Alpha-methyl-L-serine
  SITE 13: note = Alpha-methyl-L-leucine
  SITE 16: note = Ornithine
  SITE 17: note = Lysine is chemically modified through conjugation of the side chain with 2-[2-(2-amino-ethoxy)-ethoxy]-acetyl-Gamma-Glutamic acid-CO-(CH2)16-CO2H
  SITE 20: note = 2-aminoisobutyric acid
  SITE 25: note = Alpha-methyl-L-tyrosine
  SITE 40: note = Lysine amide is chemically modified through conjugation of the side chain with 24x Polyethylene glycol-(6S,16S)-6,16-bis(aminomethyl)-4,7,15,18-tetraoxo-11 -(4-oxobutanoyl)-5,8,11,14,17-pentaazahenicosanedioic acid (BEA-MalDap2) which is attached to two Fc sequences
YXQGTXTSDYXIXLDXKAQXQFIEXLLEGSPSSGAPPPSK

SEQ ID NO: 893 - protein, 40 aa, synthetic construct; identical to SEQ ID NO: 887
  SITE 2: note = 2-aminoisobutyric acid
  SITE 6: note = (S)-2-amino-3-(2-fluorophenyl)-2-methylpropanoic acid
  SITE 11: note = Alpha-methyl-L-serine
  SITE 13: note = Alpha-methyl-L-leucine
  SITE 16: note = Ornithine
  SITE 17: note = Lysine is chemically modified through conjugation of the side chain with 2-[2-(2-amino-ethoxy)-ethoxy]-acetyl-Gamma-Glutamic acid-CO-(CH2)16-CO2H
  SITE 20: note = 2-aminoisobutyric acid
  SITE 21: note = Ornithine
  SITE 24: note = D-Glutamic acid
  SITE 25: note = Alpha-methyl-L-tyrosine
  SITE 40: note = Lysine amide is chemically modified through conjugation of the side chain with 24x Polyethylene glycol-(6S,16S)-6,16-bis(aminomethyl)-4,7,15,18-tetraoxo-11 -(4-oxobutanoyl)-5,8,11,14,17-pentaazahenicosanedioic acid (BEA-MalDap2) which is attached to two Fc sequences

SEQ ID NO: 894 - protein, 40 aa, synthetic construct; identical to SEQ ID NO: 887
  SITE 2: note = 2-aminoisobutyric acid
  SITE 6: note = (S)-2-amino-3-(2-fluorophenyl)-2-methylpropanoic acid
  SITE 11: note = Alpha-methyl-L-serine
  SITE 13: note = Alpha-methyl-L-leucine
  SITE 16: note = Ornithine
  SITE 17: note = Lysine is chemically modified through conjugation of the side chain with 2-[2-(2-amino-ethoxy)-ethoxy]-acetyl-Gamma-Glutamic acid-CO-(CH2)16-CO2H
  SITE 20: note = 2-aminoisobutyric acid
  SITE 21: note = Ornithine
  SITE 25: note = Alpha-methyl-L-tyrosine
  SITE 40: note = Lysine amide is chemically modified through conjugation of the side chain with 24x Polyethylene glycol-(6S,16S)-6,16-bis(aminomethyl)-4,7,15,18-tetraoxo-11 -(4-oxobutanoyl)-5,8,11,14,17-pentaazahenicosanedioic acid (BEA-MalDap2) which is attached to two Fc sequences

SEQ ID NO: 895 - protein, 40 aa, synthetic construct
  SITE 2: note = 2-aminoisobutyric acid
  SITE 6: note = (S)-2-amino-3-(2-fluorophenyl)-2-methylpropanoic acid
  SITE 11: note = Alpha-methyl-L-serine
  SITE 13: note = Alpha-methyl-L-leucine
  SITE 16: note = Ornithine
  SITE 17: note = Lysine is chemically modified through conjugation of the side chain with 2-[2-(2-amino-ethoxy)-ethoxy]-acetyl-Gamma-Glutamic acid-CO-(CH2)16-CO2H
  SITE 20: note = 2-aminoisobutyric acid
  SITE 21: note = Ornithine
  SITE 24: note = D-Glutamine
  SITE 25: note = Alpha-methyl-L-tyrosine
  SITE 40: note = Lysine amide is chemically modified through conjugation of the side chain with 24x Polyethylene glycol-(6S,16S)-6,16-bis(aminomethyl)-4,7,15,18-tetraoxo-11 -(4-oxobutanoyl)-5,8,11,14,17-pentaazahenicosanedioic acid (BEA-MalDap2) which is attached to two Fc sequences
YXQGTXTSDYXIXLDXKAQXXFIQXLLEGSPSSGAPPPSK

SEQ ID NO: 896 - protein, 40 aa, synthetic construct; identical to SEQ ID NO: 895
  SITE 2: note = 2-aminoisobutyric acid
  SITE 6: note = (S)-2-amino-3-(2-fluorophenyl)-2-methylpropanoic acid
  SITE 11: note = Alpha-methyl-L-serine
  SITE 13: note = Alpha-methyl-L-leucine
  SITE 16: note = Ornithine
  SITE 17: note = Lysine is chemically modified through conjugation of the side chain with 2-[2-(2-amino-ethoxy)-ethoxy]-acetyl-Gamma-Glutamic acid-CO-(CH2)16-CO2H
  SITE 20: note = 2-aminoisobutyric acid
  SITE 21: note = Ornithine
  SITE 25: note = Alpha-methyl-L-tyrosine
  SITE 40: note = Lysine amide is chemically modified through conjugation of the side chain with 24x Polyethylene glycol-(6S,16S)-6,16-bis(aminomethyl)-4,7,15,18-tetraoxo-11 -(4-oxobutanoyl)-5,8,11,14,17-pentaazahenicosanedioic acid (BEA-MalDap2) which is attached to two Fc sequences

SEQ ID NO: 897 - protein, 40 aa, synthetic construct; identical to SEQ ID NO: 885
  SITE 2: note = 2-aminoisobutyric acid
  SITE 6: note = (S)-2-amino-3-(2-fluorophenyl)-2-methylpropanoic acid
  SITE 11: note = Alpha-methyl-L-serine
  SITE 13: note = Alpha-methyl-L-leucine
  SITE 16: note = Ornithine
  SITE 17: note = Lysine is chemically modified through conjugation of the side chain with 2-[2-(2-amino-ethoxy)-ethoxy]-acetyl-Gamma-Glutamic acid-CO-(CH2)16-CO2H
  SITE 20: note = 2-aminoisobutyric acid
  SITE 24: note = D-Glutamic acid
  SITE 25: note = Alpha-methyl-L-tyrosine
  SITE 40: note = Lysine amide is chemically modified through conjugation of the side chain with 24x Polyethylene glycol-(6S,16S)-6,16-bis(aminomethyl)-4,7,15,18-tetraoxo-11 -(4-oxobutanoyl)-5,8,11,14,17-pentaazahenicosanedioic acid (BEA-MalDap2) which is attached to two Fc sequences

SEQ ID NO: 898 - protein, 40 aa, synthetic construct; identical to SEQ ID NO: 885
  SITE 2: note = 2-aminoisobutyric acid
  SITE 6: note = (S)-2-amino-3-(2-fluorophenyl)-2-methylpropanoic acid
  SITE 11: note = Alpha-methyl-L-serine
  SITE 13: note = Alpha-methyl-L-leucine
  SITE 16: note = Ornithine
  SITE 17: note = Lysine is chemically modified through conjugation of the side chain with 2-[2-(2-amino-ethoxy)-ethoxy]-acetyl-Gamma-Glutamic acid-CO-(CH2)16-CO2H
  SITE 20: note = 2-aminoisobutyric acid
  SITE 25: note = Alpha-methyl-L-tyrosine
  SITE 40: note = Lysine amide is chemically modified through conjugation of the side chain with 24x Polyethylene glycol-(6S,16S)-6,16-bis(aminomethyl)-4,7,15,18-tetraoxo-11 -(4-oxobutanoyl)-5,8,11,14,17-pentaazahenicosanedioic acid (BEA-MalDap2) which is attached to two Fc sequences

SEQ ID NO: 899 - protein, 40 aa, synthetic construct; identical to SEQ ID NO: 830
  SITE 2: note = 2-aminoisobutyric acid
  SITE 6: note = (S)-2-amino-3-(2-fluorophenyl)-2-methylpropanoic acid
  SITE 11: note = Alpha-methyl-L-serine
  SITE 13: note = Alpha-methyl-L-leucine
  SITE 16: note = Ornithine
  SITE 17: note = Lysine is chemically modified through conjugation of the side chain with 2-[2-(2-amino-ethoxy)-ethoxy]-acetyl-Gamma-Glutamic acid-CO-(CH2)16-CO2H
  SITE 20: note = 2-aminoisobutyric acid
  SITE 24: note = D-Glutamine
  SITE 25: note = Alpha-methyl-L-tyrosine
  SITE 40: note = Lysine amide is chemically modified through conjugation of the side chain with 24x Polyethylene glycol-(6S,16S)-6,16-bis(aminomethyl)-4,7,15,18-tetraoxo-11 -(4-oxobutanoyl)-5,8,11,14,17-pentaazahenicosanedioic acid (BEA-MalDap2) which is attached to two Fc sequences

SEQ ID NO: 900 - protein, 40 aa, synthetic construct; identical to SEQ ID NO: 865
  SITE 2: note = 1-Aminocyclobutane-1-carboxylic acid
  SITE 6: note = (S)-2-amino-3-(2-fluorophenyl)-2-methylpropanoic acid
  SITE 11: note = Alpha-methyl-L-serine
  SITE 13: note = Alpha-methyl-L-leucine
  SITE 16: note = Ornithine
  SITE 17: note = Lysine is chemically modified through conjugation of the side chain with 2-[2-(2-amino-ethoxy)-ethoxy]-acetyl-Gamma-Glutamic acid-CO-(CH2)16-CO2H
  SITE 20: note = Alpha-methyl-L-3-(4-pyridyl)-L-alanine
  SITE 25: note = Alpha-methyl-L-tyrosine
  SITE 40: note = Lysine amide is chemically modified through conjugation of the side chain with 24x Polyethylene glycol-(6S,16S)-6,16-bis(aminomethyl)-4,7,15,18-tetraoxo-11 -(4-oxobutanoyl)-5,8,11,14,17-pentaazahenicosanedioic acid (BEA-MalDap2) which is attached to two Fc sequences

SEQ ID NO: 901 - protein, 40 aa, synthetic construct
  SITE 2: note = D-Alanine
  SITE 6: note = (S)-2-amino-3-(2-fluorophenyl)-2-methylpropanoic acid
  SITE 11: note = Alpha-methyl-L-serine
  SITE 13: note = Alpha-methyl-L-leucine
  SITE 16: note = Ornithine
  SITE 17: note = Lysine is chemically modified through conjugation of the side chain with 2-[2-(2-amino-ethoxy)-ethoxy]-acetyl-Gamma-Glutamic acid-CO-(CH2)16-CO2H
  SITE 20: note = Alpha-methyl-L-3-(4-pyridyl)-L-alanine
  SITE 25: note = Alpha-methyl-L-tyrosine
  SITE 40: note = Lysine amide is chemically modified through conjugation of the side chain with 24x Polyethylene glycol-(6S,16S)-6,16-bis(aminomethyl)-4,7,15,18-tetraoxo-11 -(4-oxobutanoyl)-5,8,11,14,17-pentaazahenicosanedioic acid (BEA-MalDap2) which is attached to two Fc sequences
YAQGTXTSDYXIXLDXKAQXEFIEXLIEGSPSSGAPPPSK

SEQ ID NO: 902 - protein, 40 aa, synthetic construct
  SITE 2: note = D-Alanine
  SITE 6: note = (S)-2-amino-3-(2-fluorophenyl)-2-methylpropanoic acid
  SITE 11: note = Alpha-methyl-L-serine
  SITE 13: note = Alpha-methyl-L-leucine
  SITE 16: note = Ornithine
  SITE 17: note = Lysine is chemically modified through conjugation of the side chain with 2-[2-(2-amino-ethoxy)-ethoxy]-acetyl-Gamma-Glutamic acid-CO-(CH2)16-CO2H
  SITE 20: note = Alpha-methyl-L-3-(4-pyridyl)-L-alanine
  SITE 21: note = Ornithine
  SITE 25: note = Alpha-methyl-L-tyrosine
  SITE 40: note = Lysine amide is chemically modified through conjugation of the side chain with 24x Polyethylene glycol-(6S,16S)-6,16-bis(aminomethyl)-4,7,15,18-tetraoxo-11 -(4-oxobutanoyl)-5,8,11,14,17-pentaazahenicosanedioic acid (BEA-MalDap2) which is attached to two Fc sequences
YAQGTXTSDYXIXLDXKAQXXFIEXLIEGSPSSGAPPPSK

SEQ ID NO: 903 - protein, 40 aa, synthetic construct; identical to SEQ ID NO: 902
  SITE 2: note = D-Alanine
  SITE 6: note = (S)-2-amino-3-(2-fluorophenyl)-2-methylpropanoic acid
  SITE 11: note = Alpha-methyl-L-serine
  SITE 13: note = Alpha-methyl-L-leucine
  SITE 16: note = Ornithine
  SITE 17: note = Lysine is chemically modified through conjugation of the side chain with 2-[2-(2-amino-ethoxy)-ethoxy]-acetyl-Gamma-Glutamic acid-CO-(CH2)16-CO2H
  SITE 20: note = Alpha-methyl-L-3-(4-pyridyl)-L-alanine
  SITE 21: note = Ornithine
  SITE 24: note = D-Glutamic acid
  SITE 25: note = Alpha-methyl-L-tyrosine
  SITE 40: note = Lysine amide is chemically modified through conjugation of the side chain with 24x Polyethylene glycol-(6S,16S)-6,16-bis(aminomethyl)-4,7,15,18-tetraoxo-11 -(4-oxobutanoyl)-5,8,11,14,17-pentaazahenicosanedioic acid (BEA-MalDap2) which is attached to two Fc sequences

SEQ ID NO: 904 - protein, 40 aa, synthetic construct
  SITE 2: note = D-Alanine
  SITE 6: note = (S)-2-amino-3-(2-fluorophenyl)-2-methylpropanoic acid
  SITE 11: note = Alpha-methyl-L-serine
  SITE 13: note = Alpha-methyl-L-leucine
  SITE 16: note = Ornithine
  SITE 17: note = Lysine is chemically modified through conjugation of the side chain with 2-[2-(2-amino-ethoxy)-ethoxy]-acetyl-Gamma-Glutamic acid-CO-(CH2)16-CO2H
  SITE 20: note = Alpha-methyl-L-3-(4-pyridyl)-L-alanine
  SITE 25: note = Alpha-methyl-L-tyrosine
  SITE 40: note = Lysine amide is chemically modified through conjugation of the side chain with 24x Polyethylene glycol-(6S,16S)-6,16-bis(aminomethyl)-4,7,15,18-tetraoxo-11 -(4-oxobutanoyl)-5,8,11,14,17-pentaazahenicosanedioic acid (BEA-MalDap2) which is attached to two Fc sequences
YAQGTXTSDYXIXLDXKAQXEFIEXLLEGSPSSGAPPPSK

SEQ ID NO: 905 - protein, 40 aa, synthetic construct; identical to SEQ ID NO: 904
  SITE 2: note = D-Alanine
  SITE 6: note = (S)-2-amino-3-(2-fluorophenyl)-2-methylpropanoic acid
  SITE 11: note = Alpha-methyl-L-serine
  SITE 13: note = Alpha-methyl-L-leucine
  SITE 16: note = Ornithine
  SITE 17: note = Lysine is chemically modified through conjugation of the side chain with 2-[2-(2-amino-ethoxy)-ethoxy]-acetyl-Gamma-Glutamic acid-CO-(CH2)16-CO2H
  SITE 20: note = Alpha-methyl-L-3-(4-pyridyl)-L-alanine
  SITE 24: note = D-Glutamic acid
  SITE 25: note = Alpha-methyl-L-tyrosine
  SITE 40: note = Lysine amide is chemically modified through conjugation of the side chain with 24x Polyethylene glycol-(6S,16S)-6,16-bis(aminomethyl)-4,7,15,18-tetraoxo-11 -(4-oxobutanoyl)-5,8,11,14,17-pentaazahenicosanedioic acid (BEA-MalDap2) which is attached to two Fc sequences

SEQ ID NO: 906 - protein, 40 aa, synthetic construct
  SITE 2: note = D-Alanine
  SITE 6: note = (S)-2-amino-3-(2-fluorophenyl)-2-methylpropanoic acid
  SITE 11: note = Alpha-methyl-L-serine
  SITE 13: note = Alpha-methyl-L-leucine
  SITE 16: note = Ornithine
  SITE 17: note = Lysine is chemically modified through conjugation of the side chain with 2-[2-(2-amino-ethoxy)-ethoxy]-acetyl-Gamma-Glutamic acid-CO-(CH2)16-CO2H
  SITE 20: note = Alpha-methyl-L-3-(4-pyridyl)-L-alanine
  SITE 21: note = Ornithine
  SITE 25: note = Alpha-methyl-L-tyrosine
  SITE 40: note = Lysine amide is chemically modified through conjugation of the side chain with 24x Polyethylene glycol-(6S,16S)-6,16-bis(aminomethyl)-4,7,15,18-tetraoxo-11 -(4-oxobutanoyl)-5,8,11,14,17-pentaazahenicosanedioic acid (BEA-MalDap2) which is attached to two Fc sequences
YAQGTXTSDYXIXLDXKAQXXFIEXLLEGSPSSGAPPPSK

SEQ ID NO: 907 - protein, 40 aa, synthetic construct
  SITE 2: note = D-Alanine
  SITE 6: note = (S)-2-amino-3-(2-fluorophenyl)-2-methylpropanoic acid
  SITE 11: note = Alpha-methyl-L-serine
  SITE 13: note = Alpha-methyl-L-leucine
  SITE 16: note = Ornithine
  SITE 17: note = Lysine is chemically modified through conjugation of the side chain with 2-[2-(2-amino-ethoxy)-ethoxy]-acetyl-Gamma-Glutamic acid-CO-(CH2)16-CO2H
  SITE 20: note = 2-aminoisobutyric acid
  SITE 21: note = Ornithine
  SITE 24: note = D-Glutamine
  SITE 25: note = Alpha-methyl-L-tyrosine
  SITE 40: note = Lysine amide is chemically modified through conjugation of the side chain with 24x Polyethylene glycol-(6S,16S)-6,16-bis(aminomethyl)-4,7,15,18-tetraoxo-11 -(4-oxobutanoyl)-5,8,11,14,17-pentaazahenicosanedioic acid (BEA-MalDap2) which is attached to two Fc sequences
YAQGTXTSDYXIXLDXKAQXXFIQXLLEGSPSSGAPPPSK

SEQ ID NO: 908 - protein, 40 aa, synthetic construct; identical to SEQ ID NO: 907
  SITE 2: note = D-Alanine
  SITE 6: note = (S)-2-amino-3-(2-fluorophenyl)-2-methylpropanoic acid
  SITE 11: note = Alpha-methyl-L-serine
  SITE 13: note = Alpha-methyl-L-leucine
  SITE 16: note = Ornithine
  SITE 17: note = Lysine is chemically modified through conjugation of the side chain with 2-[2-(2-amino-ethoxy)-ethoxy]-acetyl-Gamma-Glutamic acid-CO-(CH2)16-CO2H
  SITE 20: note = 2-aminoisobutyric acid
  SITE 21: note = Ornithine
  SITE 25: note = Alpha-methyl-L-tyrosine
  SITE 40: note = Lysine amide is chemically modified through conjugation of the side chain with 24x Polyethylene glycol-(6S,16S)-6,16-bis(aminomethyl)-4,7,15,18-tetraoxo-11 -(4-oxobutanoyl)-5,8,11,14,17-pentaazahenicosanedioic acid (BEA-MalDap2) which is attached to two Fc sequences

SEQ ID NO: 909 - protein, 40 aa, synthetic construct; identical to SEQ ID NO: 902
  SITE 2: note = D-Alanine
  SITE 6: note = (S)-2-amino-3-(2-fluorophenyl)-2-methylpropanoic acid
  SITE 11: note = Alpha-methyl-L-serine
  SITE 13: note = Alpha-methyl-L-leucine
  SITE 16: note = Ornithine
  SITE 17: note = Lysine is chemically modified through conjugation of the side chain with 2-[2-(2-amino-ethoxy)-ethoxy]-acetyl-Gamma-Glutamic acid-CO-(CH2)16-CO2H
  SITE 20: note = 2-aminoisobutyric acid
  SITE 21: note = Ornithine
  SITE 25: note = Alpha-methyl-L-tyrosine
  SITE 40: note = Lysine amide is chemically modified through conjugation of the side chain with 24x Polyethylene glycol-(6S,16S)-6,16-bis(aminomethyl)-4,7,15,18-tetraoxo-11 -(4-oxobutanoyl)-5,8,11,14,17-pentaazahenicosanedioic acid (BEA-MalDap2) which is attached to two Fc sequences

SEQ ID NO: 910 - protein, 40 aa, synthetic construct; identical to SEQ ID NO: 788
  SITE 2: note = 2-aminoisobutyric acid
  SITE 6: note = (S)-2-amino-3-(2-fluorophenyl)-2-methylpropanoic acid
  SITE 10: note = 3-(4-pyridyl)-L-alanine
  SITE 13: note = Alpha-methyl-L-leucine
  SITE 16: note = Ornithine
  SITE 17: note = Lysine is chemically modified through conjugation of the side chain with 2-[2-(2-amino-ethoxy)-ethoxy]-acetyl-Gamma-Glutamic acid-CO-(CH2)16-CO2H
  SITE 20: note = Alpha-methyl-L-3-(4-pyridyl)-L-alanine
  SITE 21: note = Ornithine
  SITE 25: note = Alpha-methyl-L-tyrosine
  SITE 40: note = Lysine amide is chemically modified through conjugation of the side chain with 24x Polyethylene glycol-(6S,16S)-6,16-bis(aminomethyl)-4,7,15,18-tetraoxo-11 -(4-oxobutanoyl)-5,8,11,14,17-pentaazahenicosanedioic acid (BEA-MalDap2) which is attached to two Fc sequences

SEQ ID NO: 911 - protein, 40 aa, synthetic construct; identical to SEQ ID NO: 790
  SITE 2: note = 2-aminoisobutyric acid
  SITE 6: note = (S)-2-amino-3-(2-fluorophenyl)-2-methylpropanoic acid
  SITE 10: note = 3-(4-pyridyl)-L-alanine
  SITE 11: note = Alpha-methyl-L-serine
  SITE 13: note = Alpha-methyl-L-leucine
  SITE 16: note = Ornithine
  SITE 17: note = Lysine is chemically modified through conjugation of the side chain with 2-[2-(2-amino-ethoxy)-ethoxy]-acetyl-Gamma-Glutamic acid-CO-(CH2)16-CO2H
  SITE 20: note = Alpha-methyl-L-3-(4-pyridyl)-L-alanine
  SITE 21: note = Ornithine
  SITE 24: note = D-Glutamic acid
  SITE 25: note = Alpha-methyl-L-tyrosine
  SITE 40: note = Lysine amide is chemically modified through conjugation of the side chain with 24x Polyethylene glycol-(6S,16S)-6,16-bis(aminomethyl)-4,7,15,18-tetraoxo-11 -(4-oxobutanoyl)-5,8,11,14,17-pentaazahenicosanedioic acid (BEA-MalDap2) which is attached to two Fc sequences

SEQ ID NO: 912 - protein, 40 aa, synthetic construct; identical to SEQ ID NO: 845
  SITE 2: note = 2-aminoisobutyric acid
  SITE 6: note = (S)-2-amino-3-(2-fluorophenyl)-2-methylpropanoic acid
  SITE 10: note = 3-(4-pyridyl)-L-alanine
  SITE 11: note = Alpha-methyl-L-serine
  SITE 13: note = Alpha-methyl-L-leucine
  SITE 16: note = Ornithine
  SITE 17: note = Lysine is chemically modified through conjugation of the side chain with 2-[2-(2-amino-ethoxy)-ethoxy]-acetyl-Gamma-Glutamic acid-CO-(CH2)16-CO2H
  SITE 20: note = Alpha-methyl-L-3-(4-pyridyl)-L-alanine
  SITE 25: note = Alpha-methyl-L-tyrosine
  SITE 40: note = Lysine amide is chemically modified through conjugation of the side chain with 24x Polyethylene glycol-(6S,16S)-6,16-bis(aminomethyl)-4,7,15,18-tetraoxo-11 -(4-oxobutanoyl)-5,8,11,14,17-pentaazahenicosanedioic acid (BEA-MalDap2) which is attached to two Fc sequences

SEQ ID NO: 913 - protein, 40 aa, synthetic construct
  SITE 2: note = 2-aminoisobutyric acid
  SITE 6: note = (S)-2-amino-3-(2-fluorophenyl)-2-methylpropanoic acid
  SITE 10: note = 3-(4-pyridyl)-L-alanine
  SITE 13: note = Alpha-methyl-L-leucine
  SITE 16: note = Ornithine
  SITE 17: note = Lysine is chemically modified through conjugation of the side chain with 2-[2-(2-amino-ethoxy)-ethoxy]-acetyl-Gamma-Glutamic acid-CO-(CH2)16-CO2H
  SITE 20: note = Alpha-methyl-L-3-(4-pyridyl)-L-alanine
  SITE 25: note = Alpha-methyl-L-tyrosine
  SITE 40: note = Lysine amide is chemically modified through conjugation of the side chain with 24x Polyethylene glycol-(6S,16S)-6,16-bis(aminomethyl)-4,7,15,18-tetraoxo-11 -(4-oxobutanoyl)-5,8,11,14,17-pentaazahenicosanedioic acid (BEA-MalDap2) which is attached to two Fc sequences
YXQGTXTSDXSIXLDXKAQXEFIEXLIEGSPSSGAPPPSK

SEQ ID NO: 914 - protein, 40 aa, synthetic construct; identical to SEQ ID NO: 792
  SITE 2: note = 2-aminoisobutyric acid
  SITE 6: note = (S)-2-amino-3-(2-fluorophenyl)-2-methylpropanoic acid
  SITE 11: note = Alpha-methyl-L-serine
  SITE 13: note = Alpha-methyl-L-leucine
  SITE 16: note = Ornithine
  SITE 17: note = Lysine is chemically modified through conjugation of the side chain with 2-[2-(2-amino-ethoxy)-ethoxy]-acetyl-Gamma-Glutamic acid-CO-(CH2)16-CO2H
  SITE 20: note = 2-aminoisobutyric acid
  SITE 21: note = Ornithine
  SITE 25: note = Alpha-methyl-L-tyrosine
  SITE 40: note = Lysine amide is chemically modified through conjugation of the side chain with 24x Polyethylene glycol-(6S,16S)-6,16-bis(aminomethyl)-4,7,15,18-tetraoxo-11 -(4-oxobutanoyl)-5,8,11,14,17-pentaazahenicosanedioic acid (BEA-MalDap2) which is attached to two Fc sequences

SEQ ID NO: 915 - protein, 40 aa, synthetic construct; identical to SEQ ID NO: 845
  SITE 2: note = 2-aminoisobutyric acid
  SITE 6: note = (S)-2-amino-3-(2-fluorophenyl)-2-methylpropanoic acid
  SITE 10: note = 3-(4-pyridyl)-L-alanine
  SITE 11: note = Alpha-methyl-L-serine
  SITE 13: note = Alpha-methyl-L-leucine
  SITE 16: note = Ornithine
  SITE 17: note = Lysine is chemically modified through conjugation of the side chain with 2-[2-(2-amino-ethoxy)-ethoxy]-acetyl-Gamma-Glutamic acid-CO-(CH2)16-CO2H
  SITE 20: note = Alpha-methyl-L-3-(4-pyridyl)-L-alanine
  SITE 24: note = D-Glutamic acid
  SITE 25: note = Alpha-methyl-L-tyrosine
  SITE 40: note = Lysine amide is chemically modified through conjugation of the side chain with 24x Polyethylene glycol-(6S,16S)-6,16-bis(aminomethyl)-4,7,15,18-tetraoxo-11 -(4-oxobutanoyl)-5,8,11,14,17-pentaazahenicosanedioic acid (BEA-MalDap2) which is attached to two Fc sequences

SEQ ID NO: 916 - protein, 40 aa, synthetic construct; identical to SEQ ID NO: 902
  SITE 2: note = D-Alanine
  SITE 6: note = (S)-2-amino-3-(2-fluorophenyl)-2-methylpropanoic acid
  SITE 11: note = Alpha-methyl-L-serine
  SITE 13: note = Alpha-methyl-L-leucine
  SITE 16: note = Ornithine
  SITE 17: note = Lysine is chemically modified through conjugation of the side chain with (2-[2-(2-amino-ethoxy)-ethoxy]-acetyl)2-Gamma-Glutamic acid-CO-(CH2)16-CO2H
  SITE 20: note = Alpha-methyl-L-3-(4-pyridyl)-L-alanine
  SITE 21: note = Ornithine
  SITE 25: note = Alpha-methyl-L-tyrosine
  SITE 40: note = Lysine amide is chemically modified through conjugation of the side chain with 24x Polyethylene glycol-(6S,16S)-6,16-bis(aminomethyl)-4,7,15,18-tetraoxo-11 -(4-oxobutanoyl)-5,8,11,14,17-pentaazahenicosanedioic acid (BEA-MalDap2) which is attached to two Fc sequences

SEQ ID NO: 917 - protein, 40 aa, synthetic construct; identical to SEQ ID NO: 906
  SITE 2: note = D-Alanine
  SITE 6: note = (S)-2-amino-3-(2-fluorophenyl)-2-methylpropanoic acid
  SITE 11: note = Alpha-methyl-L-serine
  SITE 13: note = Alpha-methyl-L-leucine
  SITE 16: note = Ornithine
  SITE 17: note = Lysine is chemically modified through conjugation of the side chain with (2-[2-(2-amino-ethoxy)-ethoxy]-acetyl)2-Gamma-Glutamic acid-CO-(CH2)16-CO2H
  SITE 20: note = Alpha-methyl-L-3-(4-pyridyl)-L-alanine
  SITE 21: note = Ornithine
  SITE 25: note = Alpha-methyl-L-tyrosine
  SITE 40: note = Lysine amide is chemically modified through conjugation of the side chain with 24x Polyethylene glycol-(6S,16S)-6,16-bis(aminomethyl)-4,7,15,18-tetraoxo-11 -(4-oxobutanoyl)-5,8,11,14,17-pentaazahenicosanedioic acid (BEA-MalDap2) which is attached to two Fc sequences

SEQ ID NO: 918 - protein, 40 aa, synthetic construct; identical to SEQ ID NO: 792
  SITE 2: note = 2-aminoisobutyric acid
  SITE 6: note = (S)-2-amino-3-(2-fluorophenyl)-2-methylpropanoic acid
  SITE 11: note = Alpha-methyl-L-serine
  SITE 13: note = Alpha-methyl-L-leucine
  SITE 16: note = Ornithine
  SITE 17: note = Lysine is chemically modified through conjugation of the side chain with 2-[2-(2-amino-ethoxy)-ethoxy]-acetyl-Gamma-Glutamic acid-CO-(CH2)16-CO2H
  SITE 20: note = 2-aminoisobutyric acid
  SITE 21: note = Ornithine
  SITE 24: note = D-Glutamic acid
  SITE 25: note = Alpha-methyl-L-tyrosine
  SITE 40: note = Lysine amide is chemically modified through conjugation of the side chain with 24x Polyethylene glycol-(6S,16S)-6,16-bis(aminomethyl)-4,7,15,18-tetraoxo-11 -(4-oxobutanoyl)-5,8,11,14,17-pentaazahenicosanedioic acid (BEA-MalDap2) which is attached to two Fc sequences

SEQ ID NO: 919 - protein, 40 aa, synthetic construct
  SITE 1: note = N-Methyl-L-tyrosine
  SITE 2: note = 2-aminoisobutyric acid
  SITE 6: note = (S)-2-amino-3-(2-fluorophenyl)-2-methylpropanoic acid
  SITE 11: note = Alpha-methyl-L-serine
  SITE 13: note = Alpha-methyl-L-leucine
  SITE 16: note = Ornithine
  SITE 17: note = Lysine is chemically modified through conjugation of the side chain with (2-[2-(2-amino-ethoxy)-ethoxy]-acetyl)2-Gamma-Glutamic acid-CO-(CH2)16-CO2H
  SITE 20: note = Alpha-methyl-L-3-(4-pyridyl)-L-alanine
  SITE 25: note = Alpha-methyl-L-tyrosine
  SITE 40: note = Lysine amide is chemically modified through conjugation of the side chain with 24x Polyethylene glycol-(6S,16S)-6,16-bis(aminomethyl)-4,7,15,18-tetraoxo-11 -(4-oxobutanoyl)-5,8,11,14,17-pentaazahenicosanedioic acid (BEA-MalDap2) which is attached to two Fc sequences
XXQGTXTSDYXIXLDXKAQXEFIEXLIEGSPSSGAPPPSK

SEQ ID NO: 920 - protein, 40 aa, synthetic construct; identical to SEQ ID NO: 792
  SITE 2: note = 2-aminoisobutyric acid
  SITE 6: note = (S)-2-amino-3-(2-fluorophenyl)-2-methylpropanoic acid
  SITE 11: note = Alpha-methyl-L-serine
  SITE 13: note = Alpha-methyl-L-leucine
  SITE 16: note = Ornithine
  SITE 17: note = Lysine is chemically modified through conjugation of the side chain with (2-[2-(2-amino-ethoxy)-ethoxy]-acetyl)2-Gamma-Glutamic acid-CO-(CH2)18-CO2H
  SITE 20: note = Alpha-methyl-L-3-(4-pyridyl)-L-alanine
  SITE 21: note = Ornithine
  SITE 24: note = D-Glutamic acid
  SITE 25: note = Alpha-methyl-L-tyrosine
  SITE 40: note = Lysine amide is chemically modified through conjugation of the side chain with 24x Polyethylene glycol-(6S,16S)-6,16-bis(aminomethyl)-4,7,15,18-tetraoxo-11 -(4-oxobutanoyl)-5,8,11,14,17-pentaazahenicosanedioic acid (BEA-MalDap2) which is attached to two Fc sequences

SEQ ID NO: 921 - protein, 40 aa, synthetic construct; identical to SEQ ID NO: 823
  SITE 2: note = 2-aminoisobutyric acid
  SITE 6: note = (S)-2-amino-3-(2-fluorophenyl)-2-methylpropanoic acid
  SITE 11: note = Alpha-methyl-L-serine
  SITE 13: note = Alpha-methyl-L-leucine
  SITE 16: note = Ornithine
  SITE 17: note = Lysine is chemically modified through conjugation of the side chain with (2-[2-(2-amino-ethoxy)-ethoxy]-acetyl)2-Gamma-Glutamic acid-CO-(CH2)18-CO2H
  SITE 20: note = Alpha-methyl-L-3-(4-pyridyl)-L-alanine
  SITE 21: note = Ornithine
  SITE 25: note = Alpha-methyl-L-tyrosine
  SITE 40: note = Lysine amide is chemically modified through conjugation of the side chain with 24x Polyethylene glycol-(6S,16S)-6,16-bis(aminomethyl)-4,7,15,18-tetraoxo-11 -(4-oxobutanoyl)-5,8,11,14,17-pentaazahenicosanedioic acid (BEA-MalDap2) which is attached to two Fc sequences

SEQ ID NO: 922 - protein, 40 aa, synthetic construct; identical to SEQ ID NO: 790
  SITE 2: note = 2-aminoisobutyric acid
  SITE 6: note = (S)-2-amino-3-(2-fluorophenyl)-2-methylpropanoic acid
  SITE 10: note = 3-(4-pyridyl)-L-alanine
  SITE 11: note = Alpha-methyl-L-serine
  SITE 13: note = Alpha-methyl-L-leucine
  SITE 16: note = Ornithine
  SITE 17: note = Lysine is chemically modified through conjugation of the side chain with (2-[2-(2-amino-ethoxy)-ethoxy]-acetyl)2-Gamma-Glutamic acid-CO-(CH2)16-CO2H
  SITE 20: note = Alpha-methyl-L-3-(4-pyridyl)-L-alanine
  SITE 21: note = Ornithine
  SITE 24: note = D-Glutamic acid
  SITE 25: note = Alpha-methyl-L-tyrosine
  SITE 40: note = Lysine amide is chemically modified through conjugation of the side chain with 24x Polyethylene glycol-(6S,16S)-6,16-bis(aminomethyl)-4,7,15,18-tetraoxo-11 -(4-oxobutanoyl)-5,8,11,14,17-pentaazahenicosanedioic acid-IgG4 Fc with charge balancing mutations (Q274K - CH2, E355R - CH3, E419Q- CH3) (BEA-MalDap2-KRQ) which is attached to two Fc sequences

SEQ ID NO: 923 - protein, 40 aa, synthetic construct; identical to SEQ ID NO: 792
  SITE 2: note = 2-aminoisobutyric acid
  SITE 6: note = (S)-2-amino-3-(2-fluorophenyl)-2-methylpropanoic acid
  SITE 11: note = Alpha-methyl-L-serine
  SITE 13: note = Alpha-methyl-L-leucine
  SITE 16: note = Ornithine
  SITE 17: note = Lysine is chemically modified through conjugation of the side chain with (2-[2-(2-amino-ethoxy)-ethoxy]-acetyl)2-Gamma-Glutamic acid-CO-(CH2)16-CO2H
  SITE 20: note = Alpha-methyl-L-3-(4-pyridyl)-L-alanine
  SITE 21: note = Ornithine
  SITE 24: note = D-Glutamic acid
  SITE 25: note = Alpha-methyl-L-tyrosine
  SITE 40: note = Lysine amide is chemically modified through conjugation of the side chain with 24x Polyethylene glycol-(6S,16S)-6,16-bis(aminomethyl)-4,7,15,18-tetraoxo-11 -(4-oxobutanoyl)-5,8,11,14,17-pentaazahenicosanedioic acid-IgG4 Fc with charge balancing mutations (Q274K - CH2, E355R - CH3, E419Q- CH3) (BEA-MalDap2-KRQ) which is attached to two Fc sequences

SEQ ID NO: 924 - protein, 55 aa, synthetic construct; identical to SEQ ID NO: 794
  SITE 2: note = 2-aminoisobutyric acid
  SITE 6: note = (S)-2-amino-3-(2-fluorophenyl)-2-methylpropanoic acid
  SITE 10: note = 3-(4-pyridyl)-L-alanine
  SITE 11: note = Alpha-methyl-L-serine
  SITE 13: note = Alpha-methyl-L-leucine
  SITE 16: note = Ornithine
  SITE 17: note = Lysine is chemically modified through conjugation of the side chain with (2-[2-(2-amino-ethoxy)-ethoxy]-acetyl)2-Gamma-Glutamic acid-CO-(CH2)16-CO2H
  SITE 20: note = Alpha-methyl-L-3-(4-pyridyl)-L-alanine
  SITE 21: note = Ornithine
  SITE 25: note = Alpha-methyl-L-tyrosine
  SITE 55: note = Lysine amide is chemically modified through conjugation of the side chain with (6S,16S)-6,16-bis(aminomethyl)-4,7,15,18-tetraoxo-11-(4-oxo butanoyl)-5,8,11,14,17-pentaazahenicosanedioic acid-IgG4 Fc with charge balancing mutations (Q274K - CH2, E355R - CH3, E419Q- CH3) (BEA-MalDap2-KRQ) which is attached to two Fc sequences

SEQ ID NO: 925 - protein, 55 aa, synthetic construct; identical to SEQ ID NO: 795
  SITE 2: note = 2-aminoisobutyric acid
  SITE 6: note = (S)-2-amino-3-(2-fluorophenyl)-2-methylpropanoic acid
  SITE 11: note = Alpha-methyl-L-serine
  SITE 13: note = Alpha-methyl-L-leucine
  SITE 16: note = Ornithine
  SITE 17: note = Lysine is chemically modified through conjugation of the side chain with (2-[2-(2-amino-ethoxy)-ethoxy]-acetyl)2-Gamma-Glutamic acid-CO-(CH2)16-CO2H
  SITE 20: note = Alpha-methyl-L-3-(4-pyridyl)-L-alanine
  SITE 21: note = Ornithine
  SITE 24: note = D-Glutamic acid
  SITE 25: note = Alpha-methyl-L-tyrosine
  SITE 55: note = Lysine amide is chemically modified through conjugation of the side chain with (6S,16S)-6,16-bis(aminomethyl)-4,7,15,18-tetraoxo-11-(4-oxo butanoyl)-5,8,11,14,17-pentaazahenicosanedioic acid-IgG4 Fc with charge balancing mutations (Q274K - CH2, E355R - CH3, E419Q- CH3) (BEA-MalDap2-KRQ) which is attached to two Fc sequences

SEQ ID NO: 926 - protein, 40 aa, synthetic construct; identical to SEQ ID NO: 792
  SITE 2: note = 2-aminoisobutyric acid
  SITE 6: note = (S)-2-amino-3-(2-fluorophenyl)-2-methylpropanoic acid
  SITE 11: note = Alpha-methyl-L-serine
  SITE 13: note = Alpha-methyl-L-leucine
  SITE 16: note = Ornithine
  SITE 17: note = Lysine is chemically modified through conjugation of the side chain with (2-[2-(2-amino-ethoxy)-ethoxy]-acetyl)2-Gamma-Glutamic acid-CO-(CH2)16-CO2H
  SITE 20: note = Alpha-methyl-L-3-(4-pyridyl)-L-alanine
  SITE 21: note = Ornithine
  SITE 24: note = D-Glutamic acid
  SITE 25: note = Alpha-methyl-L-tyrosine
  SITE 40: note = Lysine amide is chemically modified through conjugation of the side chain with (2-[2-(2-amino-ethoxy)-ethoxy]-acetyl)6-GPAPAPAPAPAPA-(6S,1 6S)-6,16-bis(aminomethyl)-4,7,15,18-tetraoxo-11-(4-oxobutan oyl)-5,8,11,14,17-pentaazahenicosanedioic acid-IgG4 Fc with charge balancing mutations (Q274K - CH2, E355R - CH3, E419Q- CH3) (BEA-MalDap2-KRQ) which is attached to two Fc sequences

SEQ ID NO: 927 - protein, 40 aa, synthetic construct; identical to SEQ ID NO: 792
  SITE 2: note = 2-aminoisobutyric acid
  SITE 6: note = (S)-2-amino-3-(2-fluorophenyl)-2-methylpropanoic acid
  SITE 11: note = Alpha-methyl-L-serine
  SITE 13: note = Alpha-methyl-L-leucine
  SITE 16: note = Ornithine
  SITE 17: note = Lysine is chemically modified through conjugation of the side chain with (2-[2-(2-amino-ethoxy)-ethoxy]-acetyl)2-Gamma-Glutamic acid-CO-(CH2)16-CO2H
  SITE 20: note = Alpha-methyl-L-3-(4-pyridyl)-L-alanine
  SITE 21: note = Ornithine
  SITE 24: note = D-Glutamic acid
  SITE 25: note = Alpha-methyl-L-tyrosine
  SITE 40: note = Lysine amide is chemically modified through conjugation of the side chain with 24x Polyethylene glycol-(6S,16S)-6,16-bis(aminomethyl)-4,7,15,18-tetraoxo-11 -(4-oxobutanoyl)-5,8,11,14,17-pentaazahenicosanedioic acid-IgG4 Fc with charge balancing mutations (Q274K - CH2, E355R - CH3, E419Q- CH3) with N terminal Isoleucine-glycine (IG) dipeptide adjacent the C229 of the hinge (BEA-MalDap2-IG KRQ) which is attached to two Fc sequences

SEQ ID NO: 928 - protein, 40 aa, synthetic construct; identical to SEQ ID NO: 826
  SITE 2: note = 2-aminoisobutyric acid
  SITE 6: note = (S)-2-amino-3-(2-fluorophenyl)-2-methylpropanoic acid
  SITE 11: note = Alpha-methyl-L-serine
  SITE 13: note = Alpha-methyl-L-leucine
  SITE 16: note = Ornithine
  SITE 17: note = Lysine is chemically modified through conjugation of the side chain with (2-[2-(2-amino-ethoxy)-ethoxy]-acetyl)2-Gamma-Glutamic acid-CO-(CH2)16-CO2H
  SITE 20: note = Alpha-methyl-L-3-(4-pyridyl)-L-alanine
  SITE 21: note = Ornithine
  SITE 24: note = D-Glutamic acid
  SITE 25: note = Alpha-methyl-L-tyrosine
  SITE 29: note = 2-aminoisobutyric acid
  SITE 40: note = Lysine amide is chemically modified through conjugation of the side chain with 24x Polyethylene glycol-(6S,16S)-6,16-bis(aminomethyl)-4,7,15,18-tetraoxo-11 -(4-oxobutanoyl)-5,8,11,14,17-pentaazahenicosanedioic acid-IgG4 Fc with charge balancing mutations (Q274K - CH2, E355R - CH3, E419Q- CH3) with N terminal Isoleucine-glycine (IG) dipeptide adjacent the C229 of the hinge (BEA-MalDap2-IG KRQ) which is attached to two Fc sequences

SEQ ID NO: 929 - protein, 40 aa, synthetic construct; identical to SEQ ID NO: 792
  SITE 2: note = 2-aminoisobutyric acid
  SITE 6: note = (S)-2-amino-3-(2-fluorophenyl)-2-methylpropanoic acid
  SITE 11: note = Alpha-methyl-L-serine
  SITE 13: note = Alpha-methyl-L-leucine
  SITE 16: note = Ornithine
  SITE 17: note = Lysine is chemically modified through conjugation of the side chain with (2-[2-(2-amino-ethoxy)-ethoxy]-acetyl)2-Gamma-Glutamic acid-CO-(CH2)16-CO2H
  SITE 20: note = Alpha-methyl-L-3-(4-pyridyl)-L-alanine
  SITE 21: note = Ornithine
  SITE 24: note = D-Glutamic acid
  SITE 25: note = Alpha-methyl-L-tyrosine
  SITE 40: note = Lysine amide is chemically modified through conjugation of the side chain with (2-[2-(2-amino-ethoxy)-ethoxy]-acetyl)6-(6S,16S)-6,16-bis(a minomethyl)-4,7,15,18-tetraoxo-11-(4-oxobutanoyl)-5,8,11,14 ,17-pentaazahenicosanedioic acid-IgG4 Fc with charge balancing mutations (Q274K - CH2, E355R - CH3, E419Q- CH3) with N terminal Isoleucine-glycine (IG) dipeptide adjacent the C229 of the hinge (BEA-MalDap2-IG KRQ) which is attached to two Fc sequences

SEQ ID NO: 930 - protein, 55 aa, synthetic construct
  SITE 2: note = 2-aminoisobutyric acid
  SITE 6: note = (S)-2-amino-3-(2-fluorophenyl)-2-methylpropanoic acid
  SITE 11: note = Alpha-methyl-L-serine
  SITE 13: note = Alpha-methyl-L-leucine
  SITE 16: note = Ornithine
  SITE 17: note = Lysine is chemically modified through conjugation of the side chain with (2-[2-(2-amino-ethoxy)-ethoxy]-acetyl)2-Gamma-Glutamic acid-CO-(CH2)16-CO2H
  SITE 20: note = Alpha-methyl-L-3-(4-pyridyl)-L-alanine
  SITE 21: note = Ornithine
  SITE 24: note = D-Glutamic acid
  SITE 25: note = Alpha-methyl-L-tyrosine
  SITE 29: note = 2-aminoisobutyric acid
  SITE 55: note = Lysine amide is chemically modified through conjugation of the side chain with (6S,16S)-6,16-bis(aminomethyl)-4,7,15,18-tetraoxo-11-(4-oxo butanoyl)-5,8,11,14,17-pentaazahenicosanedioic acid-IgG4 Fc with charge balancing mutations (Q274K - CH2, E355R - CH3, E419Q- CH3) with N terminal Isoleucine-glycine (IG) dipeptide adjacent the C229 of the hinge (BEA-MalDap2-IG KRQ) which is attached to two Fc sequences
YXQGTXTSDYXIXLDXKAQXXFIEXLIEXGGGGGGSGGGGSGAPAPAPAPAPAPK

SEQ ID NO: 931 - protein, 40 aa, synthetic construct; identical to SEQ ID NO: 826
  SITE 2: note = 2-aminoisobutyric acid
  SITE 6: note = (S)-2-amino-3-(2-fluorophenyl)-2-methylpropanoic acid
  SITE 11: note = Alpha-methyl-L-serine
  SITE 13: note = Alpha-methyl-L-leucine
  SITE 16: note = Ornithine
  SITE 17: note = Lysine is chemically modified through conjugation of the side chain with (2-[2-(2-amino-ethoxy)-ethoxy]-acetyl)2-Gamma-Glutamic acid-CO-(CH2)16-CO2H
  SITE 20: note = Alpha-methyl-L-3-(4-pyridyl)-L-alanine
  SITE 21: note = Ornithine
  SITE 24: note = D-Glutamic acid
  SITE 25: note = Alpha-methyl-L-tyrosine
  SITE 29: note = 2-aminoisobutyric acid
  SITE 40: note = Lysine amide is chemically modified through conjugation of the side chain with (2-[2-(2-amino-ethoxy)-ethoxy]-acetyl)6-GPAPAPAPAPAPA-(6S,1 6S)-6,16-bis(aminomethyl)-4,7,15,18-tetraoxo-11-(4-oxobutan oyl)-5,8,11,14,17-pentaazahenicosanedioic acid-IgG4 Fc with charge balancing mutations (Q274K - CH2, E355R - CH3, E419Q- CH3) with N terminal Isoleucine-glycine (IG) dipeptide adjacent the C229 of the hinge (BEA-MalDap2-IG KRQ) which is attached to two Fc sequences

SEQ ID NO: 932 - protein, 40 aa, synthetic construct; identical to SEQ ID NO: 826
  SITE 2: note = 2-aminoisobutyric acid
  SITE 6: note = (S)-2-amino-3-(2-fluorophenyl)-2-methylpropanoic acid
  SITE 11: note = Alpha-methyl-L-serine
  SITE 13: note = Alpha-methyl-L-leucine
  SITE 16: note = Ornithine
  SITE 17: note = Lysine is chemically modified through conjugation of the side chain with (2-[2-(2-amino-ethoxy)-ethoxy]-acetyl)2-Gamma-Glutamic acid-CO-(CH2)16-CO2H
  SITE 20: note = Alpha-methyl-L-3-(4-pyridyl)-L-alanine
  SITE 21: note = Ornithine
  SITE 24: note = D-Glutamic acid
  SITE 25: note = Alpha-methyl-L-tyrosine
  SITE 29: note = 2-aminoisobutyric acid
  SITE 40: note = Lysine amide is chemically modified through conjugation of the side chain with (2-[2-(2-amino-ethoxy)-ethoxy]-acetyl)6-(6S,16S)-6,16-bis(a minomethyl)-4,7,15,18-tetraoxo-11-(4-oxobutanoyl)-5,8,11,14 ,17-pentaazahenicosanedioic acid-IgG4 Fc with charge balancing mutations (Q274K - CH2, E355R - CH3, E419Q- CH3) with N terminal Isoleucine-glycine (IG) dipeptide adjacent the C229 of the hinge (BEA-MalDap2-IG KRQ) which is attached to two Fc sequences

SEQ ID NO: 933 - protein, 40 aa, synthetic construct; identical to SEQ ID NO: 826
  SITE 2: note = 2-aminoisobutyric acid
  SITE 6: note = (S)-2-amino-3-(2-fluorophenyl)-2-methylpropanoic acid
  SITE 11: note = Alpha-methyl-L-serine
  SITE 13: note = Alpha-methyl-L-leucine
  SITE 16: note = Ornithine
  SITE 17: note = Lysine is chemically modified through conjugation of the side chain with (2-[2-(2-amino-ethoxy)-ethoxy]-acetyl)2-Gamma-Glutamic acid-CO-(CH2)16-CO2H
  SITE 20: note = Alpha-methyl-L-3-(4-pyridyl)-L-alanine
  SITE 21: note = Ornithine
  SITE 25: note = Alpha-methyl-L-tyrosine
  SITE 29: note = 2-aminoisobutyric acid
  SITE 40: note = Lysine amide is chemically modified through conjugation of the side chain with 24x Polyethylene glycol-(6S,16S)-6,16-bis(aminomethyl)-4,7,15,18-tetraoxo-11 -(4-oxobutanoyl)-5,8,11,14,17-pentaazahenicosanedioic acid-IgG4 Fc with charge balancing mutations (Q274K - CH2, E355R - CH3, E419Q- CH3) with N terminal Isoleucine-glycine (IG) dipeptide adjacent the C229 of the hinge (BEA-MalDap2-IG KRQ) which is attached to two Fc sequences

SEQ ID NO: 934 - protein, 40 aa, synthetic construct
  SITE 2: note = 2-aminoisobutyric acid
  SITE 6: note = (S)-2-amino-3-(2-fluorophenyl)-2-methylpropanoic acid
  SITE 11: note = Alpha-methyl-L-serine
  SITE 13: note = Alpha-methyl-L-leucine
  SITE 16: note = Ornithine
  SITE 17: note = Lysine is chemically modified through conjugation of the side chain with (2-[2-(2-amino-ethoxy)-ethoxy]-acetyl)2-Gamma-Glutamic acid-CO-(CH2)16-CO2H
  SITE 20: note = Alpha-methyl-L-3-(4-pyridyl)-L-alanine
  SITE 21: note = Ornithine
  SITE 25: note = Alpha-methyl-L-tyrosine
  SITE 29: note = 2-aminoisobutyric acid
  SITE 40: note = Lysine amide is chemically modified through conjugation of the side chain with 24x Polyethylene glycol-(6S,16S)-6,16-bis(aminomethyl)-4,7,15,18-tetraoxo-11 -(4-oxobutanoyl)-5,8,11,14,17-pentaazahenicosanedioic acid-IgG4 Fc with charge balancing mutations (Q274K - CH2, E355R - CH3, E419Q- CH3) with N terminal Isoleucine-glycine (IG) dipeptide adjacent the C229 of the hinge (BEA-MalDap2-IG KRQ) which is attached to two Fc sequences
YXQGTXTSDYXIXLDXKAQXXFIQXLIEXSPSSGAPPPSK

SEQ ID NO: 935 - protein, 220 aa, synthetic construct
AGCPAPEAAGGPSVFLFPPKPKDTLMISRTPEVTCVVVDVSQEDPEVQFNWYVDGVEVHNAKTKPREEQFNSTYRVVSVLTVLHQDWLNGKEYKCKVSNKGLPSSIEKTISKAKGQPREPQVYTLPPSQEEMTKNQVSLTCLVKGFYPSDIAVEWESNGQPENNYKTTPPVLDSDGSFFLYSRLTVDKSRWQEGNVFSCSVMHEALHNHYTQKSLSLSLG

SEQ ID NO: 936 - protein, 220 aa, synthetic construct
AGCPAPEAAGGPSVFLFPPKPKDTLMISRTPEVTCVVVDVSQEDPEVKFNWYVDGVEVHNAKTKPREEQFNSTYRVVSVLTVLHQDWLNGKEYKCKVSNKGLPSSIEKTISKAKGQPREPQVYTLPPSREEMTKNQVSLTCLVKGFYPSDIAVEWESNGQPENNYKTTPPVLDSDGSFFLYSRLTVDKSRWQQGNVFSCSVMHEALHNHYTQKSLSLSLG

SEQ ID NO: 937 - protein, 19 aa, synthetic construct
MGWSCIILFLVATATGVHS

SEQ ID NO: 938 - protein, 28 aa, synthetic construct
MDSKVTIICIRFLFWFLLLCMLIGKSHT

SEQ ID NO: 939 - protein, 23 aa, synthetic construct
MKICSLTLLSFLLLAAQVLLVEG

SEQ ID NO: 940 - protein, 28 aa, synthetic construct
MDSKVTIICIRFLFWFLLLCMLIGKSHT

SEQ ID NO: 941 - protein, 220 aa, synthetic construct
IGCPAPEAAGGPSVFLFPPKPKDTLMISRTPEVTCVVVDVSQEDPEVKFNWYVDGVEVHNAKTKPREEQFNSTYRVVSVLTVLHQDWLNGKEYKCKVSNKGLPSSIEKTISKAKGQPREPQVYTLPPSREEMTKNQVSLTCLVKGFYPSDIAVEWESNGQPENNYKTTPPVLDSDGSFFLYSRLTVDKSRWQQGNVFSCSVMHEALHNHYTQKSLSLSLG

SEQ ID NO: 942 - protein, 220 aa, synthetic construct
CGCPAPEAAGGPSVFLFPPKPKDTLMISRTPEVTCVVVDVSQEDPEVKFNWYVDGVEVHNAKTKPREEQFNSTYRVVSVLTVLHQDWLNGKEYKCKVSNKGLPSSIEKTISKAKGQPREPQVYTLPPSREEMTKNQVSLTCLVKGFYPSDIAVEWESNGQPENNYKTTPPVLDSDGSFFLYSRLTVDKSRWQQGNVFSCSVMHEALHNHYTQKSLSLSLG

SEQ ID NO: 943 - protein, 221 aa, synthetic construct
AGCPAPEAAGGPSVFLFPPKPKDTLMISRTPEVTCVVVDVSHEDPEVKFNWYVDGVEVHNAKTKPREEQYNSTYRVVSVLTVLHQDWLNGKEYKCKVSNKALAAPIEKTISKAKGQPREPQVYTLPPSREEMTKNQVSLTCLVKGFYPSDIAVEWESNGQPENNYKTTPPVLDSDGSFFLYSKLTVDKSRWQQGNVFSCSVMHEALHNHYTQKSLSLSPGK

SEQ ID NO: 944 - protein, 221 aa, synthetic construct
AGCPAPELLGGPSVFLFPPKPKDTLMISRTPEVTCVVVDVSHEDPEVKFNWYVDGVEVHNAKTKPREEQYNSTYRVVSVLTVLHQDWLNGKEYKCKVSNKALPAPIEKTISKAKGQPREPQVYTLPPSREEMTKNQVSLTCLVKGFYPSDIAVEWESNGQPENNYKTTPPVLDSDGSFFLYSKLTVDKSRWQQGNVFSCSVMHEALHNHYTQKSLSLSPGK

SEQ ID NO: 945 - protein, 228 aa, synthetic construct
ESKYGPPCPPCPAPEAAGGPSVFLFPPKPKDTLMISRTPEVTCVVVDVSQEDPEVKFNWYVDGVEVHNAKTKPREEQFNSTYRVVSVLTVLHQDWLNGKEYKCKVSNKGLPSSIEKTISKAKGQPREPQVYTLPPSREECTKNQVSLTCLVKGFYPSDIAVEWESNGQPENNYKTTPPVLDSDGSFFLYSRLTVDKSRWQQGNVFSCSVMHEALHNHYTQKSLSLSLG

SEQ ID NO: 946 - protein, 228 aa, synthetic construct
ESKYGPPCPPCPAPEAAGGPSVFLFPPKPKDTLMISRTPEVTCVVVDVSQEDPEVKFNWYVDGVEVHNAKTKPREEQFNSTYRVVSVLTVLHQDWLNGKEYKCKVSNKGLPSSIEKTISKAKGQPREPQVYTLPPSREEMTKNQVSLTCLVKGFYPSDIAVEWESNGQPENNYKTTPPVCDSDGSFFLYSRLTVDKSRWQQGNVFSCSVMHEALHNHYTQKSLSLSLG

SEQ ID NO: 947 - protein, 228 aa, synthetic construct
ESKYGPPCPPCPAPEAAGGPSVFLFPPKPKDTLMISRTPEVTCVVVDVSQEDPEVKFNWYVDGVEVHNAKTKPREEQFNSTYRVVSVLTVLHQDWLNGKEYKCKVSNKGLPSSIEKTISKAKGQPREPQVYTLPPSREEMTKNQVSLTCLVKGFYPSDIAVEWESNGQPENNYKTTPPVLDSDGSFFLYSRLTVDKCRWQQGNVFSCSVMHEALHNHYTQKSLSLSLG

SEQ ID NO: 948 - protein, 228 aa, synthetic construct
ESKYGPPCPPCPAPEAAGGPSVFLFPPKPKDTLMISRTPEVTCVVVDVSQEDPEVKFNWYVDGVEVHNAKTKPREEQFNSTYRVVSVLTVLHQDWLNGKEYKCKVSNKGLPSSIEKTISKAKGQPREPQVYTLPPSREEMTKNQVSLTCLVKGFYPSDIAVEWESNGQPENNYKTTPPVLDSDGSFLLYSKLTVDKSRWQQGNVFSCSVMHEALHNHYTQKSLSLSLG

SEQ ID NO: 949 - protein, 18 aa, synthetic construct
  SITE 1: note = 2-[2-(2-amino-ethoxy)-ethoxy]-acetyl
  SITE 2: note = 2-[2-(2-amino-ethoxy)-ethoxy]-acetyl
  SITE 3: note = 2-[2-(2-amino-ethoxy)-ethoxy]-acetyl
  SITE 4: note = 2-[2-(2-amino-ethoxy)-ethoxy]-acetyl
  SITE 18: note = 4-(bis(2-aminoethyl)amino)-4-oxobutanoic acid
XXXXGPAPAPAPAPAPAX

SEQ ID NO: 950 - protein, 20 aa, synthetic construct
  SITE 1: note = 2-[2-(2-amino-ethoxy)-ethoxy]-acetyl
  SITE 2: note = 2-[2-(2-amino-ethoxy)-ethoxy]-acetyl
  SITE 3: note = 2-[2-(2-amino-ethoxy)-ethoxy]-acetyl
  SITE 4: note = 2-[2-(2-amino-ethoxy)-ethoxy]-acetyl
  SITE 5: note = 2-[2-(2-amino-ethoxy)-ethoxy]-acetyl
  SITE 6: note = 2-[2-(2-amino-ethoxy)-ethoxy]-acetyl
  SITE 20: note = 4-(bis(2-aminoethyl)amino)-4-oxobutanoic acid
XXXXXXGPAPAPAPAPAPAX

SEQ ID NO: 951 - protein, 22 aa, synthetic construct
  SITE 1: note = 2-[2-(2-amino-ethoxy)-ethoxy]-acetyl
  SITE 2: note = 2-[2-(2-amino-ethoxy)-ethoxy]-acetyl
  SITE 3: note = 2-[2-(2-amino-ethoxy)-ethoxy]-acetyl
  SITE 4: note = 2-[2-(2-amino-ethoxy)-ethoxy]-acetyl
  SITE 22: note = 4-(bis(2-aminoethyl)amino)-4-oxobutanoic acid
XXXXGPAPAPAPAPAPAPAPAX

SEQ ID NO: 952 - protein, 18 aa, synthetic construct
  SITE 18: note = 4-(bis(2-aminoethyl)amino)-4-oxobutanoic acid
GPAPAPAPAPAPAPAPAX

SEQ ID NO: 953 - protein, 21 aa, synthetic construct
  SITE 1: note = 2-[2-(2-amino-ethoxy)-ethoxy]-acetyl
  SITE 2: note = 2-[2-(2-amino-ethoxy)-ethoxy]-acetyl
  SITE 3: note = 2-[2-(2-amino-ethoxy)-ethoxy]-acetyl
  SITE 4: note = 2-[2-(2-amino-ethoxy)-ethoxy]-acetyl
  SITE 21: note = 4-(bis(2-aminoethyl)amino)-4-oxobutanoic acid
XXXXGKAAAEKAAAEKAAAEX

SEQ ID NO: 954 - protein, 27 aa, synthetic construct
  SITE 27: note = 4-(bis(2-aminoethyl)amino)-4-oxobutanoic acid
LEAEAAAKEAAAKEAAAKEAAAKALEX

SEQ ID NO: 955 - protein, 22 aa, synthetic construct
  SITE 22: note = 4-(bis(2-aminoethyl)amino)-4-oxobutanoic acid
GGGGSGGGGSGGGGSGGGGSGX

SEQ ID NO: 956 - protein, 30 aa, synthetic construct
  SITE 30: note = 4-(bis(2-aminoethyl)amino)-4-oxobutanoic acid
SGGGGSGGGGSGGGGGPAPAPAPAPAPAGX

SEQ ID NO: 957 - protein, 33 aa, synthetic construct
  SITE 33: note = 4-(bis(2-aminoethyl)amino)-4-oxobutanoic acid
SGGGGSGGGGSGGGGGKAAAEKAAAEKAAAEGX

SEQ ID NO: 958 - protein, 30 aa, synthetic construct; identical to SEQ ID NO: 956
  SITE 30: note = 4-(bis(2-aminoethyl)amino)-4-oxobutanoic acid

SEQ ID NO: 959 - protein, 33 aa, synthetic construct; identical to SEQ ID NO: 957
  SITE 33: note = 4-(bis(2-aminoethyl)amino)-4-oxobutanoic acid

SEQ ID NO: 960 - protein, 18 aa, synthetic construct
  SITE 1: note = 2-[2-(2-amino-ethoxy)-ethoxy]-acetyl
  SITE 2: note = 2-[2-(2-amino-ethoxy)-ethoxy]-acetyl
  SITE 3: note = 2-[2-(2-amino-ethoxy)-ethoxy]-acetyl
  SITE 4: note = 2-[2-(2-amino-ethoxy)-ethoxy]-acetyl
  SITE 18: note = 4-(bis(2-aminoethyl)amino)-4-oxobutanoic acid
XXXXGPKPKPKPKPKPKX

SEQ ID NO: 961 - protein, 18 aa, synthetic construct
  SITE 1: note = 2-[2-(2-amino-ethoxy)-ethoxy]-acetyl
  SITE 2: note = 2-[2-(2-amino-ethoxy)-ethoxy]-acetyl
  SITE 3: note = 2-[2-(2-amino-ethoxy)-ethoxy]-acetyl
  SITE 4: note = 2-[2-(2-amino-ethoxy)-ethoxy]-acetyl
  SITE 18: note = 4-(bis(2-aminoethyl)amino)-4-oxobutanoic acid
XXXXGPEPEPEPEPEPEX

SEQ ID NO: 962 - protein, 20 aa, synthetic construct
  SITE 1: note = 2-[2-(2-amino-ethoxy)-ethoxy]-acetyl
  SITE 2: note = 2-[2-(2-amino-ethoxy)-ethoxy]-acetyl
  SITE 3: note = 2-[2-(2-amino-ethoxy)-ethoxy]-acetyl
  SITE 4: note = 2-[2-(2-amino-ethoxy)-ethoxy]-acetyl
  SITE 5: note = 2-[2-(2-amino-ethoxy)-ethoxy]-acetyl
  SITE 6: note = 2-[2-(2-amino-ethoxy)-ethoxy]-acetyl
  SITE 20: note = 4-(bis(2-aminoethyl)amino)-4-oxobutanoic acid
XXXXXXGPAPAPAPAPAPAX

SEQ ID NO: 963 - protein, 18 aa, synthetic construct
  SITE 1: note = 2-[2-(2-amino-ethoxy)-ethoxy]-acetyl
  SITE 2: note = 2-[2-(2-amino-ethoxy)-ethoxy]-acetyl
  SITE 3: note = 2-[2-(2-amino-ethoxy)-ethoxy]-acetyl
  SITE 4: note = 2-[2-(2-amino-ethoxy)-ethoxy]-acetyl
  SITE 18: note = 4-(bis(2-aminoethyl)amino)-4-oxobutanoic acid
XXXXGPEPEPEPEPEPEX

SEQ ID NO: 964 - protein, 22 aa, synthetic construct
  SITE 1: note = 2-[2-(2-amino-ethoxy)-ethoxy]-acetyl
  SITE 2: note = 2-[2-(2-amino-ethoxy)-ethoxy]-acetyl
  SITE 3: note = 2-[2-(2-amino-ethoxy)-ethoxy]-acetyl
  SITE 4: note = 2-[2-(2-amino-ethoxy)-ethoxy]-acetyl
  SITE 22: note = 4-(bis(2-aminoethyl)amino)-4-oxobutanoic acid
XXXXGPEPEPEPEPEPEPEPEX

SEQ ID NO: 965 - protein, 20 aa, synthetic construct
  SITE 1: note = 2-[2-(2-amino-ethoxy)-ethoxy]-acetyl
  SITE 2: note = 2-[2-(2-amino-ethoxy)-ethoxy]-acetyl
  SITE 3: note = 2-[2-(2-amino-ethoxy)-ethoxy]-acetyl
  SITE 4: note = 2-[2-(2-amino-ethoxy)-ethoxy]-acetyl
  SITE 5: note = 2-[2-(2-amino-ethoxy)-ethoxy]-acetyl
  SITE 6: note = 2-[2-(2-amino-ethoxy)-ethoxy]-acetyl
  SITE 20: note = 4-(bis(2-aminoethyl)amino)-4-oxobutanoic acid
XXXXXXGPAPAPAPAPAPAX

SEQ ID NO: 966 - protein, 18 aa, synthetic construct
  SITE 1: note = 2-[2-(2-amino-ethoxy)-ethoxy]-acetyl
  SITE 2: note = 2-[2-(2-amino-ethoxy)-ethoxy]-acetyl
  SITE 3: note = 2-[2-(2-amino-ethoxy)-ethoxy]-acetyl
  SITE 4: note = 2-[2-(2-amino-ethoxy)-ethoxy]-acetyl
  SITE 18: note = 4-(bis(2-aminoethyl)amino)-4-oxobutanoic acid
XXXXGPEPEPEPEPEPEX

SEQ ID NO: 967 - protein, 22 aa, synthetic construct
  SITE 1: note = 2-[2-(2-amino-ethoxy)-ethoxy]-acetyl
  SITE 2: note = 2-[2-(2-amino-ethoxy)-ethoxy]-acetyl
  SITE 3: note = 2-[2-(2-amino-ethoxy)-ethoxy]-acetyl
  SITE 4: note = 2-[2-(2-amino-ethoxy)-ethoxy]-acetyl
  SITE 22: note = 4-(bis(2-aminoethyl)amino)-4-oxobutanoic acid
XXXXGPEPEPEPEPEPEPEPEX

SEQ ID NO: 968 - protein, 25 aa, synthetic construct
  SITE 25: note = 4-(bis(2-aminoethyl)amino)-4-oxobutanoic acid
GGGGSGGGGSGAPAPAPAPAPAPGX

SEQ ID NO: 969 - protein, 25 aa, synthetic construct
  SITE 25: note = 4-(bis(2-aminoethyl)amino)-4-oxobutanoic acid
GGGGSGGGGSGAPAPAPAPAPAPGX

SEQ ID NO: 970 - protein, 20 aa, synthetic construct
  SITE 1: note = 2-[2-(2-amino-ethoxy)-ethoxy]-acetyl
  SITE 2: note = 2-[2-(2-amino-ethoxy)-ethoxy]-acetyl
  SITE 3: note = 2-[2-(2-amino-ethoxy)-ethoxy]-acetyl
  SITE 4: note = 2-[2-(2-amino-ethoxy)-ethoxy]-acetyl
  SITE 5: note = 2-[2-(2-amino-ethoxy)-ethoxy]-acetyl
  SITE 6: note = 2-[2-(2-amino-ethoxy)-ethoxy]-acetyl
  SITE 20: note = 4-(bis(2-aminoethyl)amino)-4-oxobutanoic acid
XXXXXXGPAPAPAPAPAPAX

SEQ ID NO: 971 - protein, 20 aa, synthetic construct
  SITE 1: note = 2-[2-(2-amino-ethoxy)-ethoxy]-acetyl
  SITE 2: note = 2-[2-(2-amino-ethoxy)-ethoxy]-acetyl
  SITE 3: note = 2-[2-(2-amino-ethoxy)-ethoxy]-acetyl
  SITE 4: note = 2-[2-(2-amino-ethoxy)-ethoxy]-acetyl
  SITE 5: note = 2-[2-(2-amino-ethoxy)-ethoxy]-acetyl
  SITE 6: note = 2-[2-(2-amino-ethoxy)-ethoxy]-acetyl
  SITE 20: note = 4-(bis(2-aminoethyl)amino)-4-oxobutanoic acid
XXXXXXGPAPAPAPAPAPAX

SEQ ID NO: 972 - protein, 18 aa, synthetic construct
  SITE 1: note = 2-[2-(2-amino-ethoxy)-ethoxy]-acetyl
  SITE 2: note = 2-[2-(2-amino-ethoxy)-ethoxy]-acetyl
  SITE 3: note = 2-[2-(2-amino-ethoxy)-ethoxy]-acetyl
  SITE 4: note = 2-[2-(2-amino-ethoxy)-ethoxy]-acetyl
  SITE 18: note = 4-(bis(2-aminoethyl)amino)-4-oxobutanoic acid
XXXXGPAPAPAPAPAPAX

SEQ ID NO: 973 - protein, 14 aa, synthetic construct
  SITE 1: note = 2-[2-(2-amino-ethoxy)-ethoxy]-acetyl
  SITE 2: note = 2-[2-(2-amino-ethoxy)-ethoxy]-acetyl
  SITE 3: note = 2-[2-(2-amino-ethoxy)-ethoxy]-acetyl
  SITE 4: note = 2-[2-(2-amino-ethoxy)-ethoxy]-acetyl
  SITE 14: note = 4-(bis(2-aminoethyl)amino)-4-oxobutanoic acid
XXXXGPAPAPAPAX

SEQ ID NO: 974 - protein, 10 aa, synthetic construct
  SITE 1: note = 2-[2-(2-amino-ethoxy)-ethoxy]-acetyl
  SITE 2: note = 2-[2-(2-amino-ethoxy)-ethoxy]-acetyl
  SITE 3: note = 2-[2-(2-amino-ethoxy)-ethoxy]-acetyl
  SITE 4: note = 2-[2-(2-amino-ethoxy)-ethoxy]-acetyl
  SITE 10: note = 4-(bis(2-aminoethyl)amino)-4-oxobutanoic acid
XXXXGPAPAX

SEQ ID NO: 975 - protein, 20 aa, synthetic construct
  SITE 1: note = 2-[2-(2-amino-ethoxy)-ethoxy]-acetyl
  SITE 2: note = 2-[2-(2-amino-ethoxy)-ethoxy]-acetyl
  SITE 3: note = 2-[2-(2-amino-ethoxy)-ethoxy]-acetyl
  SITE 4: note = 2-[2-(2-amino-ethoxy)-ethoxy]-acetyl
  SITE 5: note = 2-[2-(2-amino-ethoxy)-ethoxy]-acetyl
  SITE 6: note = 2-[2-(2-amino-ethoxy)-ethoxy]-acetyl
  SITE 20: note = 4-(bis(2-aminoethyl)amino)-4-oxobutanoic acid
XXXXXXGPAPAPAPAPAPAX

SEQ ID NO: 976 - protein, 16 aa, synthetic construct
  SITE 1: note = 2-[2-(2-amino-ethoxy)-ethoxy]-acetyl
  SITE 2: note = 2-[2-(2-amino-ethoxy)-ethoxy]-acetyl
  SITE 3: note = 2-[2-(2-amino-ethoxy)-ethoxy]-acetyl
  SITE 4: note = 2-[2-(2-amino-ethoxy)-ethoxy]-acetyl
  SITE 5: note = 2-[2-(2-amino-ethoxy)-ethoxy]-acetyl
  SITE 6: note = 2-[2-(2-amino-ethoxy)-ethoxy]-acetyl
  SITE 16: note = 4-(bis(2-aminoethyl)amino)-4-oxobutanoic acid
XXXXXXGPAPAPAPAX

SEQ ID NO: 977 - protein, 12 aa, synthetic construct
  SITE 1: note = 2-[2-(2-amino-ethoxy)-ethoxy]-acetyl
  SITE 2: note = 2-[2-(2-amino-ethoxy)-ethoxy]-acetyl
  SITE 3: note = 2-[2-(2-amino-ethoxy)-ethoxy]-acetyl
  SITE 4: note = 2-[2-(2-amino-ethoxy)-ethoxy]-acetyl
  SITE 5: note = 2-[2-(2-amino-ethoxy)-ethoxy]-acetyl
  SITE 6: note = 2-[2-(2-amino-ethoxy)-ethoxy]-acetyl
  SITE 12: note = 4-(bis(2-aminoethyl)amino)-4-oxobutanoic acid
XXXXXXGPAPAX

SEQ ID NO: 978 - protein, 20 aa, synthetic construct
  SITE 1: note = 2-[2-(2-amino-ethoxy)-ethoxy]-acetyl
  SITE 2: note = 2-[2-(2-amino-ethoxy)-ethoxy]-acetyl
  SITE 3: note = 2-[2-(2-amino-ethoxy)-ethoxy]-acetyl
  SITE 4: note = 2-[2-(2-amino-ethoxy)-ethoxy]-acetyl
  SITE 5: note = 2-[2-(2-amino-ethoxy)-ethoxy]-acetyl
  SITE 6: note = 2-[2-(2-amino-ethoxy)-ethoxy]-acetyl
  SITE 20: note = 4-(bis(2-aminoethyl)amino)-4-oxobutanoic acid
XXXXXXGPAPAPAPAPAPAX

SEQ ID NO: 979 - protein, 20 aa, synthetic construct
  SITE 1: note = 2-[2-(2-amino-ethoxy)-ethoxy]-acetyl
  SITE 2: note = 2-[2-(2-amino-ethoxy)-ethoxy]-acetyl
  SITE 3: note = 2-[2-(2-amino-ethoxy)-ethoxy]-acetyl
  SITE 4: note = 2-[2-(2-amino-ethoxy)-ethoxy]-acetyl
  SITE 5: note = 2-[2-(2-amino-ethoxy)-ethoxy]-acetyl
  SITE 6: note = 2-[2-(2-amino-ethoxy)-ethoxy]-acetyl
  SITE 20: note = 4-(bis(2-aminoethyl)amino)-4-oxobutanoic acid
XXXXXXGPAPAPAPAPAPAX

SEQ ID NO: 980 - protein, 20 aa, synthetic construct
  SITE 1: note = 2-[2-(2-amino-ethoxy)-ethoxy]-acetyl
  SITE 2: note = 2-[2-(2-amino-ethoxy)-ethoxy]-acetyl
  SITE 3: note = 2-[2-(2-amino-ethoxy)-ethoxy]-acetyl
  SITE 4: note = 2-[2-(2-amino-ethoxy)-ethoxy]-acetyl
  SITE 5: note = 2-[2-(2-amino-ethoxy)-ethoxy]-acetyl
  SITE 6: note = 2-[2-(2-amino-ethoxy)-ethoxy]-acetyl
  SITE 20: note = 4-(bis(2-aminoethyl)amino)-4-oxobutanoic acid
XXXXXXGPAPAPAPAPAPAX

SEQ ID NO: 981 - protein, 20 aa, synthetic construct
  SITE 1: note = 2-[2-(2-amino-ethoxy)-ethoxy]-acetyl
  SITE 2: note = 2-[2-(2-amino-ethoxy)-ethoxy]-acetyl
  SITE 3: note = 2-[2-(2-amino-ethoxy)-ethoxy]-acetyl
  SITE 4: note = 2-[2-(2-amino-ethoxy)-ethoxy]-acetyl
  SITE 5: note = 2-[2-(2-amino-ethoxy)-ethoxy]-acetyl
  SITE 6: note = 2-[2-(2-amino-ethoxy)-ethoxy]-acetyl
  SITE 20: note = 4-(bis(2-aminoethyl)amino)-4-oxobutanoic acid
XXXXXXGPAPAPAPAPAPAX

SEQ ID NO: 982 - protein, 20 aa, synthetic construct
  SITE 1: note = 2-[2-(2-amino-ethoxy)-ethoxy]-acetyl
  SITE 2: note = 2-[2-(2-amino-ethoxy)-ethoxy]-acetyl
  SITE 3: note = 2-[2-(2-amino-ethoxy)-ethoxy]-acetyl
  SITE 4: note = 2-[2-(2-amino-ethoxy)-ethoxy]-acetyl
  SITE 5: note = 2-[2-(2-amino-ethoxy)-ethoxy]-acetyl
  SITE 6: note = 2-[2-(2-amino-ethoxy)-ethoxy]-acetyl
  SITE 20: note = 4-(bis(2-aminoethyl)amino)-4-oxobutanoic acid
XXXXXXGPAPAPAPAPAPAX

SEQ ID NO: 983 - protein, 21 aa, synthetic construct
  SITE 1: note = 2-[2-(2-amino-ethoxy)-ethoxy]-acetyl
  SITE 2: note = 2-[2-(2-amino-ethoxy)-ethoxy]-acetyl
  SITE 3: note = 2-[2-(2-amino-ethoxy)-ethoxy]-acetyl
  SITE 4: note = 2-[2-(2-amino-ethoxy)-ethoxy]-acetyl
  SITE 21: note = 4-(bis(2-aminoethyl)amino)-4-oxobutanoic acid
XXXXGKAAAEKAAAEKAAAEX

SEQ ID NO: 984 - protein, 20 aa, synthetic construct
  SITE 1: note = 2-[2-(2-amino-ethoxy)-ethoxy]-acetyl
  SITE 2: note = 2-[2-(2-amino-ethoxy)-ethoxy]-acetyl
  SITE 3: note = 2-[2-(2-amino-ethoxy)-ethoxy]-acetyl
  SITE 4: note = 2-[2-(2-amino-ethoxy)-ethoxy]-acetyl
  SITE 5: note = 2-[2-(2-amino-ethoxy)-ethoxy]-acetyl
  SITE 6: note = 2-[2-(2-amino-ethoxy)-ethoxy]-acetyl
  SITE 20: note = 4-(bis(2-aminoethyl)amino)-4-oxobutanoic acid
XXXXXXGPAPAPAPAPAPAX

SEQ ID NO: 985 - protein, 25 aa, synthetic construct
  SITE 25: note = 4-(bis(2-aminoethyl)amino)-4-oxobutanoic acid
GGGGSGGGGSGAPAPAPAPAPAPGX

SEQ ID NO: 986 - protein, 25 aa, synthetic construct
  SITE 25: note = 4-(bis(2-aminoethyl)amino)-4-oxobutanoic acid
GGGGSGGGGSGAPAPAPAPAPAPGX

SEQ ID NO: 987 - protein, 20 aa, synthetic construct
  SITE 1: note = 2-[2-(2-amino-ethoxy)-ethoxy]-acetyl
  SITE 2: note = 2-[2-(2-amino-ethoxy)-ethoxy]-acetyl
  SITE 3: note = 2-[2-(2-amino-ethoxy)-ethoxy]-acetyl
  SITE 4: note = 2-[2-(2-amino-ethoxy)-ethoxy]-acetyl
  SITE 5: note = 2-[2-(2-amino-ethoxy)-ethoxy]-acetyl
  SITE 6: note = 2-[2-(2-amino-ethoxy)-ethoxy]-acetyl
  SITE 20: note = 4-(bis(2-aminoethyl)amino)-4-oxobutanoic acid
XXXXXXGPAPAPAPAPAPAX

SEQ ID NO: 988 - protein, 20 aa, synthetic construct
  SITE 1: note = 2-[2-(2-amino-ethoxy)-ethoxy]-acetyl
  SITE 2: note = 2-[2-(2-amino-ethoxy)-ethoxy]-acetyl
  SITE 3: note = 2-[2-(2-amino-ethoxy)-ethoxy]-acetyl
  SITE 4: note = 2-[2-(2-amino-ethoxy)-ethoxy]-acetyl
  SITE 5: note = 2-[2-(2-amino-ethoxy)-ethoxy]-acetyl
  SITE 6: note = 2-[2-(2-amino-ethoxy)-ethoxy]-acetyl
  SITE 20: note = 4-(bis(2-aminoethyl)amino)-4-oxobutanoic acid
XXXXXXGPAPAPAPAPAPAX

SEQ ID NO: 989 - protein, 20 aa, synthetic construct
  SITE 1: note = 2-[2-(2-amino-ethoxy)-ethoxy]-acetyl
  SITE 2: note = 2-[2-(2-amino-ethoxy)-ethoxy]-acetyl
  SITE 3: note = 2-[2-(2-amino-ethoxy)-ethoxy]-acetyl
  SITE 4: note = 2-[2-(2-amino-ethoxy)-ethoxy]-acetyl
  SITE 5: note = 2-[2-(2-amino-ethoxy)-ethoxy]-acetyl
  SITE 6: note = 2-[2-(2-amino-ethoxy)-ethoxy]-acetyl
  SITE 20: note = 4-(bis(2-aminoethyl)amino)-4-oxobutanoic acid
XXXXXXGPAPAPAPAPAPAX

SEQ ID NO: 990 - protein, 20 aa, synthetic construct
  SITE 1: note = 2-[2-(2-amino-ethoxy)-ethoxy]-acetyl
  SITE 2: note = 2-[2-(2-amino-ethoxy)-ethoxy]-acetyl
  SITE 3: note = 2-[2-(2-amino-ethoxy)-ethoxy]-acetyl
  SITE 4: note = 2-[2-(2-amino-ethoxy)-ethoxy]-acetyl
  SITE 5: note = 2-[2-(2-amino-ethoxy)-ethoxy]-acetyl
  SITE 6: note = 2-[2-(2-amino-ethoxy)-ethoxy]-acetyl
  SITE 20: note = 4-(bis(2-aminoethyl)amino)-4-oxobutanoic acid
XXXXXXGPAPAPAPAPAPAX

SEQ ID NO: 991 - protein, 20 aa, synthetic construct
  SITE 1: note = 2-[2-(2-amino-ethoxy)-ethoxy]-acetyl
  SITE 2: note = 2-[2-(2-amino-ethoxy)-ethoxy]-acetyl
  SITE 3: note = 2-[2-(2-amino-ethoxy)-ethoxy]-acetyl
  SITE 4: note = 2-[2-(2-amino-ethoxy)-ethoxy]-acetyl
  SITE 5: note = 2-[2-(2-amino-ethoxy)-ethoxy]-acetyl
  SITE 6: note = 2-[2-(2-amino-ethoxy)-ethoxy]-acetyl
  SITE 20: note = 4-(bis(2-aminoethyl)amino)-4-oxobutanoic acid
XXXXXXGPAPAPAPAPAPAX

SEQ ID NO: 992 - protein, 20 aa, synthetic construct
  SITE 1: note = 2-[2-(2-amino-ethoxy)-ethoxy]-acetyl
  SITE 2: note = 2-[2-(2-amino-ethoxy)-ethoxy]-acetyl
  SITE 3: note = 2-[2-(2-amino-ethoxy)-ethoxy]-acetyl
  SITE 4: note = 2-[2-(2-amino-ethoxy)-ethoxy]-acetyl
  SITE 5: note = 2-[2-(2-amino-ethoxy)-ethoxy]-acetyl
  SITE 6: note = 2-[2-(2-amino-ethoxy)-ethoxy]-acetyl
  SITE 20: note = 4-(bis(2-aminoethyl)amino)-4-oxobutanoic acid
XXXXXXGPAPAPAPAPAPAX

SEQ ID NO: 993 - protein, 20 aa, synthetic construct
  SITE 1: note = 2-[2-(2-amino-ethoxy)-ethoxy]-acetyl
  SITE 2: note = 2-[2-(2-amino-ethoxy)-ethoxy]-acetyl
  SITE 3: note = 2-[2-(2-amino-ethoxy)-ethoxy]-acetyl
  SITE 4: note = 2-[2-(2-amino-ethoxy)-ethoxy]-acetyl
  SITE 5: note = 2-[2-(2-amino-ethoxy)-ethoxy]-acetyl
  SITE 6: note = 2-[2-(2-amino-ethoxy)-ethoxy]-acetyl
  SITE 20: note = 4-(bis(2-aminoethyl)amino)-4-oxobutanoic acid
XXXXXXGPAPAPAPAPAPAX

SEQ ID NO: 994 - protein, 20 aa, synthetic construct
  SITE 1: note = 2-[2-(2-amino-ethoxy)-ethoxy]-acetyl
  SITE 2: note = 2-[2-(2-amino-ethoxy)-ethoxy]-acetyl
  SITE 3: note = 2-[2-(2-amino-ethoxy)-ethoxy]-acetyl
  SITE 4: note = 2-[2-(2-amino-ethoxy)-ethoxy]-acetyl
  SITE 5: note = 2-[2-(2-amino-ethoxy)-ethoxy]-acetyl
  SITE 6: note = 2-[2-(2-amino-ethoxy)-ethoxy]-acetyl
  SITE 20: note = 4-(bis(2-aminoethyl)amino)-4-oxobutanoic acid
XXXXXXGPAPAPAPAPAPAX

SEQ ID NO: 995 - protein, 20 aa, synthetic construct
  SITE 1: note = 2-[2-(2-amino-ethoxy)-ethoxy]-acetyl
  SITE 2: note = 2-[2-(2-amino-ethoxy)-ethoxy]-acetyl
  SITE 3: note = 2-[2-(2-amino-ethoxy)-ethoxy]-acetyl
  SITE 4: note = 2-[2-(2-amino-ethoxy)-ethoxy]-acetyl
  SITE 5: note = 2-[2-(2-amino-ethoxy)-ethoxy]-acetyl
  SITE 6: note = 2-[2-(2-amino-ethoxy)-ethoxy]-acetyl
  SITE 20: note = 4-(bis(2-aminoethyl)amino)-4-oxobutanoic acid
XXXXXXGPAPAPAPAPAPAX

SEQ ID NO: 996 - protein, 31 aa, synthetic construct
  SITE 2: note = 2-aminoisobutyric acid
  SITE 6: note = (S)-2-amino-3-(2-fluorophenyl)-2-methylpropanoic acid
  SITE 10: note = 3-(4-pyridyl)-L-alanine
  SITE 11: note = 2-aminoisobutyric acid
  SITE 13: note = Alpha-methyl-L-leucine
  SITE 16: note = Ornithine
  SITE 20: note = 2-aminoisobutyric acid
  SITE 24: note = D-Glutamic acid
  SITE 25: note = Alpha-methyl-L-tyrosine
YXEGTXTSDXXIXLDXQAQXEFIEXLIEGGG

SEQ ID NO: 997 - protein, 39 aa, synthetic construct
  SITE 2: note = 2-aminoisobutyric acid
  SITE 6: note = (S)-2-amino-3-(2-fluorophenyl)-2-methylpropanoic acid
  SITE 11: note = 2-aminoisobutyric acid
  SITE 13: note = Alpha-methyl-L-leucine
  SITE 16: note = Ornithine
  SITE 20: note = 2-aminoisobutyric acid
  SITE 21: note = Ornithine
  SITE 25: note = Alpha-methyl-L-tyrosine
YXEGTXTSDYXIXLDXKAQXXFIEXLIEGSPSSGAPPPS

SEQ ID NO: 998 - protein, 31 aa, synthetic construct
  SITE 2: note = 2-aminoisobutyric acid
  SITE 6: note = (S)-2-amino-3-(2-fluorophenyl)-2-methylpropanoic acid
  SITE 11: note = 2-aminoisobutyric acid
  SITE 13: note = Alpha-methyl-L-leucine
  SITE 16: note = Ornithine
  SITE 20: note = 2-aminoisobutyric acid
  SITE 25: note = Alpha-methyl-L-tyrosine
YXEGTXTSDYXIXLDXKAQXEFIEXLIAGGG

SEQ ID NO: 999 - protein, 31 aa, synthetic construct
  SITE 2: note = 2-aminoisobutyric acid
  SITE 6: note = (S)-2-amino-3-(2-fluorophenyl)-2-methylpropanoic acid
  SITE 11: note = 2-aminoisobutyric acid
  SITE 13: note = Alpha-methyl-L-leucine
  SITE 16: note = Ornithine
  SITE 20: note = 2-aminoisobutyric acid
  SITE 25: note = Alpha-methyl-L-tyrosine
  SITE 29: note = 2-aminoisobutyric acid
YXEGTXTSDYXIXLDXKAQXEFIEXLIEXGG

SEQ ID NO: 1000 - protein, 39 aa, synthetic construct
  SITE 2: note = 2-aminoisobutyric acid
  SITE 6: note = (S)-2-amino-3-(2-fluorophenyl)-2-methylpropanoic acid
  SITE 11: note = Alpha-methyl-L-serine
  SITE 13: note = Alpha-methyl-L-leucine
  SITE 16: note = Ornithine
  SITE 20: note = Alpha-methyl-L-3-(4-pyridyl)-L-alanine
  SITE 21: note = Ornithine
  SITE 25: note = Alpha-methyl-L-tyrosine
YXQGTXTSDYXIXLDXKAQXXFIEXLVEGSPSSGAPPPS

SEQ ID NO: 1001 - protein, 39 aa, synthetic construct
  SITE 2: note = 2-aminoisobutyric acid
  SITE 6: note = (S)-2-amino-3-(2-fluorophenyl)-2-methylpropanoic acid
  SITE 10: note = 3-(4-pyridyl)-L-alanine
  SITE 11: note = Alpha-methyl-L-serine
  SITE 13: note = Alpha-methyl-L-leucine
  SITE 16: note = Ornithine
  SITE 20: note = Alpha-methyl-L-3-(4-pyridyl)-L-alanine
  SITE 21: note = Ornithine
  SITE 25: note = Alpha-methyl-L-tyrosine
YXQGTXTSDXXIXLDXKAQXXFIEXLVEGSPSSGAPPPS

SEQ ID NO: 1002 - protein, 39 aa, synthetic construct
  SITE 2: note = 2-aminoisobutyric acid
  SITE 6: note = (S)-2-amino-3-(2-fluorophenyl)-2-methylpropanoic acid
  SITE 11: note = Alpha-methyl-L-serine
  SITE 13: note = Alpha-methyl-L-leucine
  SITE 16: note = Ornithine
  SITE 20: note = Alpha-methyl-L-3-(4-pyridyl)-L-alanine
  SITE 25: note = Alpha-methyl-L-tyrosine
YXQGTXTSDYXIXLDXKAQXEFIEXLVEGSPSSGAPPPS

SEQ ID NO: 1003 - protein, 39 aa, synthetic construct
  SITE 2: note = D-Alanine
  SITE 6: note = (S)-2-amino-3-(2-fluorophenyl)-2-methylpropanoic acid
  SITE 10: note = 3-(4-pyridyl)-L-alanine
  SITE 11: note = Alpha-methyl-L-serine
  SITE 13: note = Alpha-methyl-L-leucine
  SITE 16: note = Ornithine
  SITE 20: note = Alpha-methyl-L-3-(4-pyridyl)-L-alanine
  SITE 21: note = Ornithine
  SITE 25: note = Alpha-methyl-L-tyrosine
YAQGTXTSDXXIXLDXKAQXXFIEXLIEGSPSSGAPPPS

SEQ ID NO: 1004 - protein, 39 aa, synthetic construct
  SITE 2: note = D-Alanine
  SITE 6: note = (S)-2-amino-3-(2-fluorophenyl)-2-methylpropanoic acid
  SITE 10: note = 3-(4-pyridyl)-L-alanine
  SITE 13: note = Alpha-methyl-L-leucine
  SITE 16: note = Ornithine
  SITE 20: note = Alpha-methyl-L-3-(4-pyridyl)-L-alanine
  SITE 21: note = Ornithine
  SITE 25: note = Alpha-methyl-L-tyrosine
YAQGTXTSDXSIXLDXKAQXXFIEXLIEGSPSSGAPPPS

SEQ ID NO: 1005 - protein, 39 aa, synthetic construct
  SITE 2: note = D-Alanine
  SITE 6: note = (S)-2-amino-3-(2-fluorophenyl)-2-methylpropanoic acid
  SITE 11: note = Alpha-methyl-L-serine
  SITE 13: note = Alpha-methyl-L-leucine
  SITE 16: note = Ornithine
  SITE 20: note = Alpha-methyl-L-3-(4-pyridyl)-L-alanine
  SITE 21: note = Ornithine
  SITE 25: note = Alpha-methyl-L-tyrosine
YAQGTXTSDYXIXLDXKAQXXFIEXLIEQSPSSGAPPPS

SEQ ID NO: 1006 - protein, 39 aa, synthetic construct; identical to SEQ ID NO: 97
  SITE 2: note = Alpha-methyl-L-serine
  SITE 6: note = (S)-2-amino-3-(2-fluorophenyl)-2-methylpropanoic acid
  SITE 11: note = Alpha-methyl-L-serine
  SITE 13: note = Alpha-methyl-L-leucine
  SITE 16: note = Ornithine
  SITE 20: note = Alpha-methyl-L-3-(4-pyridyl)-L-alanine
  SITE 21: note = Ornithine
  SITE 25: note = Alpha-methyl-L-tyrosine

SEQ ID NO: 1007 - protein, 39 aa, synthetic construct; identical to SEQ ID NO: 95
  SITE 2: note = Alpha-methyl-L-serine
  SITE 6: note = (S)-2-amino-3-(2-fluorophenyl)-2-methylpropanoic acid
  SITE 10: note = 3-(4-pyridyl)-L-alanine
  SITE 11: note = Alpha-methyl-L-serine
  SITE 13: note = Alpha-methyl-L-leucine
  SITE 16: note = Ornithine
  SITE 20: note = Alpha-methyl-L-3-(4-pyridyl)-L-alanine
  SITE 21: note = Ornithine
  SITE 25: note = Alpha-methyl-L-tyrosine

SEQ ID NO: 1008 - protein, 39 aa, synthetic construct; identical to SEQ ID NO: 97
  SITE 2: note = L-isovaline
  SITE 6: note = (S)-2-amino-3-(2-fluorophenyl)-2-methylpropanoic acid
  SITE 11: note = Alpha-methyl-L-serine
  SITE 13: note = Alpha-methyl-L-leucine
  SITE 16: note = Ornithine
  SITE 20: note = Alpha-methyl-L-3-(4-pyridyl)-L-alanine
  SITE 21: note = Ornithine
  SITE 25: note = Alpha-methyl-L-tyrosine

SEQ ID NO: 1009 - protein, 39 aa, synthetic construct; identical to SEQ ID NO: 95
  SITE 2: note = L-isovaline
  SITE 6: note = (S)-2-amino-3-(2-fluorophenyl)-2-methylpropanoic acid
  SITE 10: note = 3-(4-pyridyl)-L-alanine
  SITE 11: note = Alpha-methyl-L-serine
  SITE 13: note = Alpha-methyl-L-leucine
  SITE 16: note = Ornithine
  SITE 20: note = Alpha-methyl-L-3-(4-pyridyl)-L-alanine
  SITE 21: note = Ornithine
  SITE 25: note = Alpha-methyl-L-tyrosine

SEQ ID NO: 1010 - protein, 39 aa, synthetic construct; identical to SEQ ID NO: 130
  SITE 2: note = 1-Aminocyclobutane-1-carboxylic acid
  SITE 6: note = (S)-2-amino-3-(2-fluorophenyl)-2-methylpropanoic acid
  SITE 10: note = 3-(4-pyridyl)-L-alanine
  SITE 11: note = Alpha-methyl-L-serine
  SITE 13: note = Alpha-methyl-L-leucine
  SITE 16: note = Ornithine
  SITE 20: note = Alpha-methyl-L-3-(4-pyridyl)-L-alanine
  SITE 25: note = Alpha-methyl-L-tyrosine

SEQ ID NO: 1011 - protein, 39 aa, synthetic construct; identical to SEQ ID NO: 97
  SITE 2: note = 2-aminoisobutyric acid
  SITE 6: note = (S)-2-amino-3-(2-fluorophenyl)-2-methylpropanoic acid
  SITE 11: note = Alpha-methyl-L-serine
  SITE 13: note = Alpha-methyl-L-leucine
  SITE 16: note = Ornithine
  SITE 20: note = Alpha-methyl-L-leucine
  SITE 21: note = Ornithine
  SITE 24: note = D-Glutamic acid
  SITE 25: note = Alpha-methyl-L-tyrosine

SEQ ID NO: 1012 - protein, 39 aa, synthetic construct; identical to SEQ ID NO: 97
  SITE 2: note = 2-aminoisobutyric acid
  SITE 6: note = (S)-2-amino-3-(2-fluorophenyl)-2-methylpropanoic acid
  SITE 11: note = Alpha-methyl-L-serine
  SITE 13: note = Alpha-methyl-L-leucine
  SITE 16: note = Ornithine
  SITE 20: note = Alpha-methyl-L-leucine
  SITE 21: note = L-isovaline
  SITE 24: note = D-Glutamic acid
  SITE 25: note = Alpha-methyl-L-tyrosine

SEQ ID NO: 1013 - protein, 39 aa, synthetic construct; identical to SEQ ID NO: 95
  SITE 2: note = 2-aminoisobutyric acid
  SITE 6: note = (S)-2-amino-3-(2-fluorophenyl)-2-methylpropanoic acid
  SITE 10: note = 3-(4-pyridyl)-L-alanine
  SITE 11: note = Alpha-methyl-L-serine
  SITE 13: note = Alpha-methyl-L-leucine
  SITE 16: note = Ornithine
  SITE 20: note = Alpha-methyl-L-leucine
  SITE 21: note = Ornithine
  SITE 24: note = D-Glutamic acid
  SITE 25: note = Alpha-methyl-L-tyrosine

SEQ ID NO: 1014 - protein, 39 aa, synthetic construct; identical to SEQ ID NO: 95
  SITE 2: note = 2-aminoisobutyric acid
  SITE 6: note = (S)-2-amino-3-(2-fluorophenyl)-2-methylpropanoic acid
  SITE 10: note = 3-(4-pyridyl)-L-alanine
  SITE 11: note = Alpha-methyl-L-serine
  SITE 13: note = Alpha-methyl-L-leucine
  SITE 16: note = Ornithine
  SITE 20: note = Alpha-methyl-L-leucine
  SITE 21: note = L-isovaline
  SITE 24: note = D-Glutamic acid
  SITE 25: note = Alpha-methyl-L-tyrosine

SEQ ID NO: 1015 - protein, 39 aa, synthetic construct
  SITE 2: note = 2-aminoisobutyric acid
  SITE 6: note = (S)-2-amino-3-(2-fluorophenyl)-2-methylpropanoic acid
  SITE 11: note = Alpha-methyl-L-serine
  SITE 13: note = Alpha-methyl-L-leucine
  SITE 16: note = Ornithine
  SITE 20: note = Alpha-methyl-L-3-(4-pyridyl)-L-alanine
  SITE 25: note = Alpha-methyl-L-tyrosine
YXQGTXTSDYXIXLDXKAQXEFIEXLIAGSPSSGAPPPS

SEQ ID NO: 1016 - protein, 39 aa, synthetic construct
  SITE 2: note = 2-aminoisobutyric acid
  SITE 6: note = (S)-2-amino-3-(2-fluorophenyl)-2-methylpropanoic acid
  SITE 11: note = Alpha-methyl-L-serine
  SITE 13: note = Alpha-methyl-L-leucine
  SITE 16: note = Ornithine
  SITE 20: note = Alpha-methyl-L-3-(4-pyridyl)-L-alanine
  SITE 25: note = Alpha-methyl-L-tyrosine
  SITE 29: note = D-Alanine
YXQGTXTSDYXIXLDXKAQXEFIEXLIEASPSSGAPPPS

SEQ ID NO: 1017 - protein, 39 aa, synthetic construct; identical to SEQ ID NO: 1015
  SITE 2: note = 2-aminoisobutyric acid
  SITE 6: note = (S)-2-amino-3-(2-fluorophenyl)-2-methylpropanoic acid
  SITE 11: note = Alpha-methyl-L-serine
  SITE 13: note = Alpha-methyl-L-leucine
  SITE 16: note = Ornithine
  SITE 20: note = Alpha-methyl-L-3-(4-pyridyl)-L-alanine
  SITE 24: note = D-Glutamic acid
  SITE 25: note = Alpha-methyl-L-tyrosine

SEQ ID NO: 1018 - protein, 39 aa, synthetic construct
  SITE 2: note = D-Alanine
  SITE 6: note = (S)-2-amino-3-(2-fluorophenyl)-2-methylpropanoic acid
  SITE 11: note = Alpha-methyl-L-serine
  SITE 13: note = Alpha-methyl-L-leucine
  SITE 16: note = Ornithine
  SITE 20: note = Alpha-methyl-L-3-(4-pyridyl)-L-alanine
  SITE 21: note = Ornithine
  SITE 25: note = Alpha-methyl-L-tyrosine
YAQGTXTSDYXIXLDXKAQXXFIEXLIAGSPSSGAPPPS

SEQ ID NO: 1019 - protein, 39 aa, synthetic construct
  SITE 2: note = 2-aminoisobutyric acid
  SITE 6: note = (S)-2-amino-3-(2-fluorophenyl)-2-methylpropanoic acid
  SITE 11: note = Alpha-methyl-L-serine
  SITE 13: note = Alpha-methyl-L-leucine
  SITE 16: note = Ornithine
  SITE 20: note = 2-aminoisobutyric acid
  SITE 21: note = Ornithine
  SITE 24: note = D-Glutamic acid
  SITE 25: note = Alpha-methyl-L-tyrosine
YXQGTXTSDYXIXLDXKAQXXFIEXLIAGSPSSGAPPPS

SEQ ID NO: 1020 - protein, 39 aa, synthetic construct
  SITE 2: note = D-Alanine
  SITE 6: note = (S)-2-amino-3-(2-fluorophenyl)-2-methylpropanoic acid
  SITE 11: note = Alpha-methyl-L-serine
  SITE 13: note = Alpha-methyl-L-leucine
  SITE 16: note = Ornithine
  SITE 20: note = Alpha-methyl-L-3-(4-pyridyl)-L-alanine
  SITE 21: note = Ornithine
  SITE 25: note = Alpha-methyl-L-tyrosine
  SITE 29: note = D-Alanine
YAQGTXTSDYXIXLDXKAQXXFIEXLIEASPSSGAPPPS

SEQ ID NO: 1021 - protein, 39 aa, synthetic construct
  SITE 2: note = 2-aminoisobutyric acid
  SITE 6: note = (S)-2-amino-3-(2-fluorophenyl)-2-methylpropanoic acid
  SITE 11: note = Alpha-methyl-L-serine
  SITE 13: note = Alpha-methyl-L-leucine
  SITE 16: note = Ornithine
  SITE 20: note = Alpha-methyl-L-3-(4-pyridyl)-L-alanine
  SITE 25: note = Alpha-methyl-L-tyrosine
YXQGTXTSDYXIXLDXKAQXSFIEXLIEGSPSSGAPPPS

SEQ ID NO: 1022 - protein, 39 aa, synthetic construct; identical to SEQ ID NO: 1021
  SITE 2: note = 2-aminoisobutyric acid
  SITE 6: note = (S)-2-amino-3-(2-fluorophenyl)-2-methylpropanoic acid
  SITE 11: note = Alpha-methyl-L-serine
  SITE 13: note = Alpha-methyl-L-leucine
  SITE 16: note = Ornithine
  SITE 20: note = 2-aminoisobutyric acid
  SITE 25: note = Alpha-methyl-L-tyrosine

SEQ ID NO: 1023 - protein, 39 aa, synthetic construct
  SITE 2: note = 2-aminoisobutyric acid
  SITE 6: note = (S)-2-amino-3-(2-fluorophenyl)-2-methylpropanoic acid
  SITE 11: note = Alpha-methyl-L-serine
  SITE 13: note = Alpha-methyl-L-leucine
  SITE 16: note = Ornithine
  SITE 20: note = 3-(4-pyridyl)-L-alanine
  SITE 25: note = Alpha-methyl-L-tyrosine
YXQGTXTSDYXIXLDXKAQXAFIEXLIEGSPSSGAPPPS

SEQ ID NO: 1024 - protein, 39 aa, synthetic construct; identical to SEQ ID NO: 97
  SITE 2: note = 2-aminoisobutyric acid
  SITE 6: note = (S)-2-amino-3-(2-fluorophenyl)-2-methylpropanoic acid
  SITE 11: note = Alpha-methyl-L-serine
  SITE 13: note = Alpha-methyl-L-leucine
  SITE 16: note = Ornithine
  SITE 20: note = Alpha-methyl-L-phenylalanine
  SITE 21: note = 2-aminoisobutyric acid
  SITE 24: note = D-Glutamic acid
  SITE 25: note = Alpha-methyl-L-tyrosine

SEQ ID NO: 1025 - protein, 39 aa, synthetic construct; identical to SEQ ID NO: 1023
  SITE 2: note = 2-aminoisobutyric acid
  SITE 6: note = (S)-2-amino-3-(2-fluorophenyl)-2-methylpropanoic acid
  SITE 11: note = Alpha-methyl-L-serine
  SITE 13: note = Alpha-methyl-L-leucine
  SITE 16: note = Ornithine
  SITE 20: note = L-isovaline
  SITE 24: note = D-Glutamic acid
  SITE 25: note = Alpha-methyl-L-tyrosine

SEQ ID NO: 1026 - protein, 39 aa, synthetic construct; identical to SEQ ID NO: 113
  SITE 2: note = 2-aminoisobutyric acid
  SITE 6: note = (S)-2-amino-3-(2-fluorophenyl)-2-methylpropanoic acid
  SITE 11: note = Alpha-methyl-L-serine
  SITE 13: note = Alpha-methyl-L-leucine
  SITE 16: note = Ornithine
  SITE 20: note = 2-aminoisobutyric acid
  SITE 25: note = Alpha-methyl-L-tyrosine

SEQ ID NO: 1027 - protein, 39 aa, synthetic construct; identical to SEQ ID NO: 131
  SITE 2: note = 2-aminoisobutyric acid
  SITE 6: note = (S)-2-amino-3-(2-fluorophenyl)-2-methylpropanoic acid
  SITE 11: note = Alpha-methyl-L-serine
  SITE 13: note = Alpha-methyl-L-leucine
  SITE 16: note = Ornithine
  SITE 20: note = Alpha-methyl-L-3-(4-pyridyl)-L-alanine
  SITE 24: note = D-Glutamic acid
  SITE 25: note = Alpha-methyl-L-tyrosine
  SITE 29: note = 2-aminoisobutyric acid

SEQ ID NO: 1028 - protein, 39 aa, synthetic construct
  SITE 2: note = 2-aminoisobutyric acid
  SITE 6: note = (S)-2-amino-3-(2-fluorophenyl)-2-methylpropanoic acid
  SITE 11: note = Alpha-methyl-L-serine
  SITE 13: note = Alpha-methyl-L-leucine
  SITE 16: note = Ornithine
  SITE 20: note = Alpha-methyl-L-leucine
  SITE 21: note = Ornithine
  SITE 24: note = D-Glutamic acid
  SITE 25: note = Alpha-methyl-L-tyrosine
  SITE 29: note = D-Alanine
YXQGTXTSDYXIXLDXKAQXXFIEXLIAASPSSGAPPPS

SEQ ID NO: 1029 - protein, 39 aa, synthetic construct
  SITE 2: note = 2-aminoisobutyric acid
  SITE 6: note = (S)-2-amino-3-(2-fluorophenyl)-2-methylpropanoic acid
  SITE 10: note = 3-(4-pyridyl)-L-alanine
  SITE 11: note = Alpha-methyl-L-serine
  SITE 13: note = Alpha-methyl-L-leucine
  SITE 16: note = Ornithine
  SITE 20: note = Alpha-methyl-L-3-(4-pyridyl)-L-alanine
  SITE 25: note = Alpha-methyl-L-tyrosine
YXQGTXTSDXXIXLDXKAQXEFIEXLIAGSPSSGAPPPS

SEQ ID NO: 1030 - protein, 39 aa, synthetic construct
  SITE 2: note = 2-aminoisobutyric acid
  SITE 6: note = (S)-2-amino-3-(2-fluorophenyl)-2-methylpropanoic acid
  SITE 10: note = 3-(4-pyridyl)-L-alanine
  SITE 11: note = Alpha-methyl-L-serine
  SITE 13: note = Alpha-methyl-L-leucine
  SITE 16: note = Ornithine
  SITE 20: note = Alpha-methyl-L-3-(4-pyridyl)-L-alanine
  SITE 25: note = Alpha-methyl-L-tyrosine
  SITE 29: note = D-Alanine
YXQGTXTSDXXIXLDXKAQXEFIEXLIAASPSSGAPPPS

SEQ ID NO: 1031 - protein, 39 aa, synthetic construct
  SITE 2: note = 2-aminoisobutyric acid
  SITE 6: note = (S)-2-amino-3-(2-fluorophenyl)-2-methylpropanoic acid
  SITE 10: note = 3-(4-pyridyl)-L-alanine
  SITE 11: note = Alpha-methyl-L-serine
  SITE 13: note = Alpha-methyl-L-leucine
  SITE 16: note = Ornithine
  SITE 20: note = Alpha-methyl-L-leucine
  SITE 21: note = L-isovaline
  SITE 24: note = D-Glutamic acid
  SITE 25: note = Alpha-methyl-L-tyrosine
  SITE 29: note = 2-aminoisobutyric acid
YXQGTXTSDXXIXLDXKAQXXFIEXLIAXSPSSGAPPPS

SEQ ID NO: 1032 - protein, 39 aa, synthetic construct
  SITE 2: note = 2-aminoisobutyric acid
  SITE 6: note = (S)-2-amino-3-(2-fluorophenyl)-2-methylpropanoic acid
  SITE 10: note = 3-(4-pyridyl)-L-alanine
  SITE 11: note = Alpha-methyl-L-serine
  SITE 13: note = Alpha-methyl-L-leucine
  SITE 16: note = Ornithine
  SITE 20: note = Alpha-methyl-L-3-(4-pyridyl)-L-alanine
  SITE 25: note = Alpha-methyl-L-tyrosine
YXQGTXTSDXXIXLDXKAQXSFIEXLIEGSPSSGAPPPS

SEQ ID NO: 1033 - protein, 39 aa, synthetic construct
  SITE 2: note = 2-aminoisobutyric acid
  SITE 6: note = (S)-2-amino-3-(2-fluorophenyl)-2-methylpropanoic acid
  SITE 10: note = 3-(4-pyridyl)-L-alanine
  SITE 11: note = Alpha-methyl-L-serine
  SITE 13: note = Alpha-methyl-L-leucine
  SITE 16: note = Ornithine
  SITE 20: note = Alpha-methyl-L-3-(4-pyridyl)-L-alanine
  SITE 25: note = Alpha-methyl-L-tyrosine
  SITE 29: note = 2-aminoisobutyric acid
YXQGTXTSDXXIXLDXKAQXSFIEXLIEXSPSSGAPPPS

SEQ ID NO: 1034 - protein, 31 aa, synthetic construct
  SITE 2: note = 2-aminoisobutyric acid
  SITE 6: note = (S)-2-amino-3-(2-fluorophenyl)-2-methylpropanoic acid
  SITE 11: note = Alpha-methyl-L-serine
  SITE 13: note = Alpha-methyl-L-leucine
  SITE 16: note = Ornithine
  SITE 20: note = Alpha-methyl-L-3-(4-pyridyl)-L-alanine
  SITE 25: note = Alpha-methyl-L-tyrosine
YXQGTXTSDYXIXLDXKAQXEFIEXLIEGGG

SEQ ID NO: 1035 - protein, 31 aa, synthetic construct
  SITE 2: note = 2-aminoisobutyric acid
  SITE 6: note = (S)-2-amino-3-(2-fluorophenyl)-2-methylpropanoic acid
  SITE 11: note = Alpha-methyl-L-serine
  SITE 13: note = Alpha-methyl-L-leucine
  SITE 16: note = Ornithine
  SITE 20: note = Alpha-methyl-L-3-(4-pyridyl)-L-alanine
  SITE 25: note = Alpha-methyl-L-tyrosine
YXQGTXTSDYXIXLDXKAQXEFIEXLIAGGG

SEQ ID NO: 1036 - protein, 31 aa, synthetic construct; identical to SEQ ID NO: 1034
  SITE 2: note = 2-aminoisobutyric acid
  SITE 6: note = (S)-2-amino-3-(2-fluorophenyl)-2-methylpropanoic acid
  SITE 11: note = Alpha-methyl-L-serine
  SITE 13: note = Alpha-methyl-L-leucine
  SITE 16: note = Ornithine
  SITE 20: note = Alpha-methyl-L-3-(4-pyridyl)-L-alanine
  SITE 24: note = D-Glutamic acid
  SITE 25: note = Alpha-methyl-L-tyrosine

SEQ ID NO: 1037 - protein, 31 aa, synthetic construct; identical to SEQ ID NO: 1034
  SITE 2: note = 1-Aminocyclobutane-1-carboxylic acid
  SITE 6: note = (S)-2-amino-3-(2-fluorophenyl)-2-methylpropanoic acid
  SITE 11: note = Alpha-methyl-L-serine
  SITE 13: note = Alpha-methyl-L-leucine
  SITE 16: note = Ornithine
  SITE 20: note = Alpha-methyl-L-3-(4-pyridyl)-L-alanine
  SITE 25: note = Alpha-methyl-L-tyrosine

SEQ ID NO: 1038 - protein, 31 aa, synthetic construct
  SITE 2: note = 2-aminoisobutyric acid
  SITE 6: note = (S)-2-amino-3-(2-fluorophenyl)-2-methylpropanoic acid
  SITE 10: note = 3-(4-pyridyl)-L-alanine
  SITE 11: note = Alpha-methyl-L-serine
  SITE 13: note = Alpha-methyl-L-leucine
  SITE 16: note = Ornithine
  SITE 20: note = Alpha-methyl-L-3-(4-pyridyl)-L-alanine
  SITE 25: note = Alpha-methyl-L-tyrosine
YXQGTXTSDXXIXLDXKAQXEFIEXLIEGGG

SEQ ID NO: 1039 - protein, 39 aa, synthetic construct; identical to SEQ ID NO: 997
  SITE 2: note = 2-aminoisobutyric acid
  SITE 6: note = (S)-2-amino-3-(2-fluorophenyl)-2-methylpropanoic acid
  SITE 11: note = 2-aminoisobutyric acid
  SITE 13: note = Alpha-methyl-L-leucine
  SITE 16: note = Ornithine
  SITE 17: note = Lysine is chemically modified through conjugation of the side chain with (2-[2-(2-amino-ethoxy)-ethoxy]-acetyl)2-Gamma-Glutamic acid-CO-(CH2)16-CO2H
  SITE 20: note = 2-aminoisobutyric acid
  SITE 21: note = Ornithine
  SITE 25: note = Alpha-methyl-L-tyrosine

SEQ ID NO: 1040 - protein, 31 aa, synthetic construct; identical to SEQ ID NO: 998
  SITE 2: note = 2-aminoisobutyric acid
  SITE 6: note = (S)-2-amino-3-(2-fluorophenyl)-2-methylpropanoic acid
  SITE 11: note = 2-aminoisobutyric acid
  SITE 13: note = Alpha-methyl-L-leucine
  SITE 16: note = Ornithine
  SITE 17: note = Lysine is chemically modified through conjugation of the side chain with (2-[2-(2-amino-ethoxy)-ethoxy]-acetyl)2-Gamma-Glutamic acid-CO-(CH2)16-CO2H
  SITE 20: note = 2-aminoisobutyric acid
  SITE 25: note = Alpha-methyl-L-tyrosine

SEQ ID NO: 1041 - protein, 31 aa, synthetic construct; identical to SEQ ID NO: 999
  SITE 2: note = 2-aminoisobutyric acid
  SITE 6: note = (S)-2-amino-3-(2-fluorophenyl)-2-methylpropanoic acid
  SITE 11: note = 2-aminoisobutyric acid
  SITE 13: note = Alpha-methyl-L-leucine
  SITE 16: note = Ornithine
  SITE 17: note = Lysine is chemically modified through conjugation of the side chain with (2-[2-(2-amino-ethoxy)-ethoxy]-acetyl)2-Gamma-Glutamic acid-CO-(CH2)16-CO2H
  SITE 20: note = 2-aminoisobutyric acid
  SITE 25: note = Alpha-methyl-L-tyrosine
  SITE 29: note = 2-aminoisobutyric acid

SEQ ID NO: 1042 - protein, 39 aa, synthetic construct; identical to SEQ ID NO: 59
  SITE 2: note = 2-aminoisobutyric acid
  SITE 6: note = (S)-2-amino-3-(2-fluorophenyl)-2-methylpropanoic acid
  SITE 11: note = 2-aminoisobutyric acid
  SITE 13: note = Alpha-methyl-L-leucine
  SITE 16: note = Ornithine
  SITE 17: note = Lysine is chemically modified through conjugation of the side chain with (2-[2-(2-amino-ethoxy)-ethoxy]-acetyl)2-Gamma-Glutamic acid-CO-(CH2)14-CO2H
  SITE 20: note = 2-aminoisobutyric acid
  SITE 25: note = Alpha-methyl-L-tyrosine

SEQ ID NO: 1043 - protein, 39 aa, synthetic construct; identical to SEQ ID NO: 1000
  SITE 2: note = 2-aminoisobutyric acid
  SITE 6: note = (S)-2-amino-3-(2-fluorophenyl)-2-methylpropanoic acid
  SITE 11: note = Alpha-methyl-L-serine
  SITE 13: note = Alpha-methyl-L-leucine
  SITE 16: note = Ornithine
  SITE 17: note = Lysine is chemically modified through conjugation of the side chain with (2-[2-(2-amino-ethoxy)-ethoxy]-acetyl)2-Gamma-Glutamic acid-CO-(CH2)16-CO2H
  SITE 20: note = Alpha-methyl-L-3-(4-pyridyl)-L-alanine
  SITE 21: note = Ornithine
  SITE 25: note = Alpha-methyl-L-tyrosine

SEQ ID NO: 1044 - protein, 39 aa, synthetic construct; identical to SEQ ID NO: 95
  SITE 2: note = 2-aminoisobutyric acid
  SITE 6: note = (S)-2-amino-3-(2-fluorophenyl)-2-methylpropanoic acid
  SITE 10: note = 3-(4-pyridyl)-L-alanine
  SITE 11: note = Alpha-methyl-L-serine
  SITE 13: note = Alpha-methyl-L-leucine
  SITE 16: note = Ornithine
  SITE 17: note = Lysine is chemically modified through conjugation of the side chain with 2-[2-(2-amino-ethoxy)-ethoxy]-acetyl-Gamma-Glutamic acid-CO-(CH2)16-CO2H
  SITE 20: note = Alpha-methyl-L-3-(4-pyridyl)-L-alanine
  SITE 21: note = Ornithine
  SITE 25: note = Alpha-methyl-L-tyrosine

SEQ ID NO: 1045 - protein, 39 aa, synthetic construct; identical to SEQ ID NO: 1001
  SITE 2: note = 2-aminoisobutyric acid
  SITE 6: note = (S)-2-amino-3-(2-fluorophenyl)-2-methylpropanoic acid
  SITE 10: note = 3-(4-pyridyl)-L-alanine
  SITE 11: note = Alpha-methyl-L-serine
  SITE 13: note = Alpha-methyl-L-leucine
  SITE 16: note = Ornithine
  SITE 17: note = Lysine is chemically modified through conjugation of the side chain with 2-[2-(2-amino-ethoxy)-ethoxy]-acetyl-Gamma-Glutamic acid-CO-(CH2)16-CO2H
  SITE 20: note = Alpha-methyl-L-3-(4-pyridyl)-L-alanine
  SITE 21: note = Ornithine
  SITE 25: note = Alpha-methyl-L-tyrosine

SEQ ID NO: 1046 - protein, 39 aa, synthetic construct; identical to SEQ ID NO: 1000
  SITE 2: note = 2-aminoisobutyric acid
  SITE 6: note = (S)-2-amino-3-(2-fluorophenyl)-2-methylpropanoic acid
  SITE 11: note = Alpha-methyl-L-serine
  SITE 13: note = Alpha-methyl-L-leucine
  SITE 16: note = Ornithine
  SITE 17: note = Lysine is chemically modified through conjugation of the side chain with 2-[2-(2-amino-ethoxy)-ethoxy]-acetyl-Gamma-Glutamic acid-CO-(CH2)16-CO2H
  SITE 20: note = Alpha-methyl-L-3-(4-pyridyl)-L-alanine
  SITE 21: note = Ornithine
  SITE 25: note = Alpha-methyl-L-tyrosine

SEQ ID NO: 1047 - protein, 39 aa, synthetic construct; identical to SEQ ID NO: 93
  SITE 2: note = 2-aminoisobutyric acid
  SITE 6: note = (S)-2-amino-3-(2-fluorophenyl)-2-methylpropanoic acid
  SITE 10: note = 3-(4-pyridyl)-L-alanine
  SITE 13: note = Alpha-methyl-L-leucine
  SITE 16: note = Ornithine
  SITE 17: note = Lysine is chemically modified through conjugation of the side chain with epsilon-Lysine-epsilon-Lysine-Gamma-Glutamic acid-CO-(CH2)16-CO2H
  SITE 20: note = Alpha-methyl-L-3-(4-pyridyl)-L-alanine
  SITE 21: note = Ornithine
  SITE 25: note = Alpha-methyl-L-tyrosine

SEQ ID NO: 1048 - protein, 39 aa, synthetic construct; identical to SEQ ID NO: 97
  SITE 2: note = 2-aminoisobutyric acid
  SITE 6: note = (S)-2-amino-3-(2-fluorophenyl)-2-methylpropanoic acid
  SITE 11: note = Alpha-methyl-L-serine
  SITE 13: note = Alpha-methyl-L-leucine
  SITE 16: note = Ornithine
  SITE 17: note = Lysine is chemically modified through conjugation of the side chain with epsilon-Lysine-epsilon-Lysine-Gamma-Glutamic acid-CO-(CH2)16-CO2H
  SITE 20: note = Alpha-methyl-L-3-(4-pyridyl)-L-alanine
  SITE 21: note = Ornithine
  SITE 25: note = Alpha-methyl-L-tyrosine

SEQ ID NO: 1049 - protein, 39 aa, synthetic construct; identical to SEQ ID NO: 130
  SITE 2: note = 2-aminoisobutyric acid
  SITE 6: note = (S)-2-amino-3-(2-fluorophenyl)-2-methylpropanoic acid
  SITE 10: note = 3-(4-pyridyl)-L-alanine
  SITE 11: note = Alpha-methyl-L-serine
  SITE 13: note = Alpha-methyl-L-leucine
  SITE 16: note = Ornithine
  SITE 17: note = Lysine is chemically modified through conjugation of the side chain with epsilon-Lysine-epsilon-Lysine-Gamma-Glutamic acid-CO-(CH2)16-CO2H
  SITE 20: note = Alpha-methyl-L-3-(4-pyridyl)-L-alanine
  SITE 25: note = Alpha-methyl-L-tyrosine

SEQ ID NO: 1050 - protein, 39 aa, synthetic construct; identical to SEQ ID NO: 113
  SITE 2: note = 2-aminoisobutyric acid
  SITE 6: note = (S)-2-amino-3-(2-fluorophenyl)-2-methylpropanoic acid
  SITE 11: note = Alpha-methyl-L-serine
  SITE 13: note = Alpha-methyl-L-leucine
  SITE 16: note = Ornithine
  SITE 17: note = Lysine is chemically modified through conjugation of the side chain with epsilon-Lysine-epsilon-Lysine-Gamma-Glutamic acid-CO-(CH2)16-CO2H
  SITE 20: note = Alpha-methyl-L-3-(4-pyridyl)-L-alanine
  SITE 25: note = Alpha-methyl-L-tyrosine

SEQ ID NO: 1051 - protein, 39 aa, synthetic construct; identical to SEQ ID NO: 1002
  SITE 2: note = 2-aminoisobutyric acid
  SITE 6: note = (S)-2-amino-3-(2-fluorophenyl)-2-methylpropanoic acid
  SITE 11: note = Alpha-methyl-L-serine
  SITE 13: note = Alpha-methyl-L-leucine
  SITE 16: note = Ornithine
  SITE 17: note = Lysine is chemically modified through conjugation of the side chain with 2-[2-(2-amino-ethoxy)-ethoxy]-acetyl-Gamma-Glutamic acid-CO-(CH2)16-CO2H
  SITE 20: note = Alpha-methyl-L-3-(4-pyridyl)-L-alanine
  SITE 25: note = Alpha-methyl-L-tyrosine

SEQ ID NO: 1052 - protein, 39 aa, synthetic construct; identical to SEQ ID NO: 1003
  SITE 2: note = D-Alanine
  SITE 6: note = (S)-2-amino-3-(2-fluorophenyl)-2-methylpropanoic acid
  SITE 10: note = 3-(4-pyridyl)-L-alanine
  SITE 11: note = Alpha-methyl-L-serine
  SITE 13: note = Alpha-methyl-L-leucine
  SITE 16: note = Ornithine
  SITE 17: note = Lysine is chemically modified through conjugation of the side chain with 2-[2-(2-amino-ethoxy)-ethoxy]-acetyl-Gamma-Glutamic acid-CO-(CH2)16-CO2H
  SITE 20: note = Alpha-methyl-L-3-(4-pyridyl)-L-alanine
  SITE 21: note = Ornithine
  SITE 25: note = Alpha-methyl-L-tyrosine

SEQ ID NO: 1053 - protein, 39 aa, synthetic construct; identical to SEQ ID NO: 1004
  SITE 2: note = D-Alanine
  SITE 6: note = (S)-2-amino-3-(2-fluorophenyl)-2-methylpropanoic acid
  SITE 10: note = 3-(4-pyridyl)-L-alanine
  SITE 13: note = Alpha-methyl-L-leucine
  SITE 16: note = Ornithine
  SITE 17: note = Lysine is chemically modified through conjugation of the side chain with 2-[2-(2-amino-ethoxy)-ethoxy]-acetyl-Gamma-Glutamic acid-CO-(CH2)16-CO2H
  SITE 20: note = Alpha-methyl-L-3-(4-pyridyl)-L-alanine
  SITE 21: note = Ornithine
  SITE 25: note = Alpha-methyl-L-tyrosine

SEQ ID NO: 1054 - protein, 39 aa, synthetic construct; identical to SEQ ID NO: 1005
  SITE 2: note = D-Alanine
  SITE 6: note = (S)-2-amino-3-(2-fluorophenyl)-2-methylpropanoic acid
  SITE 11: note = Alpha-methyl-L-serine
  SITE 13: note = Alpha-methyl-L-leucine
  SITE 16: note = Ornithine
  SITE 17: note = Lysine is chemically modified through conjugation of the side chain with 2-[2-(2-amino-ethoxy)-ethoxy]-acetyl-Gamma-Glutamic acid-CO-(CH2)16-CO2H
  SITE 20: note = Alpha-methyl-L-3-(4-pyridyl)-L-alanine
  SITE 21: note = Ornithine
  SITE 25: note = Alpha-methyl-L-tyrosine

SEQ ID NO: 1055 - protein, 39 aa, synthetic construct; identical to SEQ ID NO: 97
  SITE 2: note = Alpha-methyl-L-serine
  SITE 6: note = (S)-2-amino-3-(2-fluorophenyl)-2-methylpropanoic acid
  SITE 11: note = Alpha-methyl-L-serine
  SITE 13: note = Alpha-methyl-L-leucine
  SITE 16: note = Ornithine
  SITE 17: note = Lysine is chemically modified through conjugation of the side chain with 2-[2-(2-amino-ethoxy)-ethoxy]-acetyl-Gamma-Glutamic acid-CO-(CH2)16-CO2H
  SITE 20: note = Alpha-methyl-L-3-(4-pyridyl)-L-alanine
  SITE 21: note = Ornithine
  SITE 25: note = Alpha-methyl-L-tyrosine

SEQ ID NO: 1056 - protein, 39 aa, synthetic construct; identical to SEQ ID NO: 95
  SITE 2: note = Alpha-methyl-L-serine
  SITE 6: note = (S)-2-amino-3-(2-fluorophenyl)-2-methylpropanoic acid
  SITE 10: note = 3-(4-pyridyl)-L-alanine
  SITE 11: note = Alpha-methyl-L-serine
  SITE 13: note = Alpha-methyl-L-leucine
  SITE 16: note = Ornithine
  SITE 17: note = Lysine is chemically modified through conjugation of the side chain with 2-[2-(2-amino-ethoxy)-ethoxy]-acetyl-Gamma-Glutamic acid-CO-(CH2)16-CO2H
  SITE 20: note = Alpha-methyl-L-3-(4-pyridyl)-L-alanine
  SITE 21: note = Ornithine
  SITE 25: note = Alpha-methyl-L-tyrosine

SEQ ID NO: 1057 - protein, 39 aa, synthetic construct; identical to SEQ ID NO: 97
  SITE 2: note = Alpha-methyl-L-serine
  SITE 6: note = (S)-2-amino-3-(2-fluorophenyl)-2-methylpropanoic acid
  SITE 11: note = Alpha-methyl-L-serine
  SITE 13: note = Alpha-methyl-L-leucine
  SITE 16: note = Ornithine
  SITE 17: note = Lysine is chemically modified through conjugation of the side chain with (2-[2-(2-amino-ethoxy)-ethoxy]-acetyl)2-Gamma-Glutamic acid-CO-(CH2)16-CO2H
  SITE 20: note = Alpha-methyl-L-3-(4-pyridyl)-L-alanine
  SITE 21: note = Ornithine
  SITE 25: note = Alpha-methyl-L-tyrosine

SEQ ID NO: 1058 - protein, 39 aa, synthetic construct; identical to SEQ ID NO: 97
  SITE 2: note = L-isovaline
  SITE 6: note = (S)-2-amino-3-(2-fluorophenyl)-2-methylpropanoic acid
  SITE 11: note = Alpha-methyl-L-serine
  SITE 13: note = Alpha-methyl-L-leucine
  SITE 16: note = Ornithine
  SITE 17: note = Lysine is chemically modified through conjugation of the side chain with 2-[2-(2-amino-ethoxy)-ethoxy]-acetyl-Gamma-Glutamic acid-CO-(CH2)16-CO2H
  SITE 20: note = Alpha-methyl-L-3-(4-pyridyl)-L-alanine
  SITE 21: note = Ornithine
  SITE 25: note = Alpha-methyl-L-tyrosine

SEQ ID NO: 1059 - protein, 39 aa, synthetic construct; identical to SEQ ID NO: 95
  SITE 2: note = L-isovaline
  SITE 6: note = (S)-2-amino-3-(2-fluorophenyl)-2-methylpropanoic acid
  SITE 10: note = 3-(4-pyridyl)-L-alanine
  SITE 11: note = Alpha-methyl-L-serine
  SITE 13: note = Alpha-methyl-L-leucine
  SITE 16: note = Ornithine
  SITE 17: note = Lysine is chemically modified through conjugation of the side chain with 2-[2-(2-amino-ethoxy)-ethoxy]-acetyl-Gamma-Glutamic acid-CO-(CH2)16-CO2H
  SITE 20: note = Alpha-methyl-L-3-(4-pyridyl)-L-alanine
  SITE 21: note = Ornithine
  SITE 25: note = Alpha-methyl-L-tyrosine

SEQ ID NO: 1060 - protein, 39 aa, synthetic construct; identical to SEQ ID NO: 97
  SITE 2: note = L-isovaline
  SITE 6: note = (S)-2-amino-3-(2-fluorophenyl)-2-methylpropanoic acid
  SITE 11: note = Alpha-methyl-L-serine
  SITE 13: note = Alpha-methyl-L-leucine
  SITE 16: note = Ornithine
  SITE 17: note = Lysine is chemically modified through conjugation of the side chain with (2-[2-(2-amino-ethoxy)-ethoxy]-acetyl)2-Gamma-Glutamic acid-CO-(CH2)16-CO2H
  SITE 20: note = Alpha-methyl-L-3-(4-pyridyl)-L-alanine
  SITE 21: note = Ornithine
  SITE 25: note = Alpha-methyl-L-tyrosine

SEQ ID NO: 1061 - protein, 39 aa, synthetic construct; identical to SEQ ID NO: 130
  SITE 2: note = 1-Aminocyclobutane-1-carboxylic acid
  SITE 6: note = (S)-2-amino-3-(2-fluorophenyl)-2-methylpropanoic acid
  SITE 10: note = 3-(4-pyridyl)-L-alanine
  SITE 11: note = Alpha-methyl-L-serine
  SITE 13: note = Alpha-methyl-L-leucine
  SITE 16: note = Ornithine
  SITE 17: note = Lysine is chemically modified through conjugation of the side chain with 2-[2-(2-amino-ethoxy)-ethoxy]-acetyl-Gamma-Glutamic acid-CO-(CH2)16-CO2H
  SITE 20: note = Alpha-methyl-L-3-(4-pyridyl)-L-alanine
  SITE 25: note = Alpha-methyl-L-tyrosine

SEQ ID NO: 1062 - protein, 39 aa, synthetic construct; identical to SEQ ID NO: 113
  SITE 2: note = 1-Aminocyclobutane-1-carboxylic acid
  SITE 6: note = (S)-2-amino-3-(2-fluorophenyl)-2-methylpropanoic acid
  SITE 11: note = Alpha-methyl-L-serine
  SITE 13: note = Alpha-methyl-L-leucine
  SITE 16: note = Ornithine
  SITE 17: note = Lysine is chemically modified through conjugation of the side chain with (2-[2-(2-amino-ethoxy)-ethoxy]-acetyl)2-Gamma-Glutamic acid-CO-(CH2)16-CO2H
  SITE 20: note = Alpha-methyl-L-3-(4-pyridyl)-L-alanine
  SITE 25: note = Alpha-methyl-L-tyrosine

SEQ ID NO: 1063 - protein, 39 aa, synthetic construct; identical to SEQ ID NO: 113
  SITE 2: note = 2-aminoisobutyric acid
  SITE 6: note = (S)-2-amino-3-(2-fluorophenyl)-2-methylpropanoic acid
  SITE 11: note = Alpha-methyl-L-serine
  SITE 13: note = Alpha-methyl-L-leucine
  SITE 16: note = Ornithine
  SITE 17: note = Lysine is chemically modified through conjugation of the side chain with epsilon-Lysine-epsilon-Lysine-Gamma-Glutamic acid-CO-(CH2)16-CO2H
  SITE 20: note = Alpha-methyl-L-3-(4-pyridyl)-L-alanine
  SITE 24: note = D-Glutamic acid
  SITE 25: note = Alpha-methyl-L-tyrosine

SEQ ID NO: 1064 - protein, 39 aa, synthetic construct; identical to SEQ ID NO: 97
  SITE 2: note = 2-aminoisobutyric acid
  SITE 6: note = (S)-2-amino-3-(2-fluorophenyl)-2-methylpropanoic acid
  SITE 11: note = Alpha-methyl-L-serine
  SITE 13: note = Alpha-methyl-L-leucine
  SITE 16: note = Ornithine
  SITE 17: note = Lysine is chemically modified through conjugation of the side chain with 2-[2-(2-amino-ethoxy)-ethoxy]-acetyl-Gamma-Glutamic acid-CO-(CH2)16-CO2H
  SITE 20: note = Alpha-methyl-L-leucine
  SITE 21: note = Ornithine
  SITE 24: note = D-Glutamic acid
  SITE 25: note = Alpha-methyl-L-tyrosine

SEQ ID NO: 1065 - protein, 39 aa, synthetic construct; identical to SEQ ID NO: 97
  SITE 2: note = 2-aminoisobutyric acid
  SITE 6: note = (S)-2-amino-3-(2-fluorophenyl)-2-methylpropanoic acid
  SITE 11: note = Alpha-methyl-L-serine
  SITE 13: note = Alpha-methyl-L-leucine
  SITE 16: note = Ornithine
  SITE 17: note = Lysine is chemically modified through conjugation of the side chain with 2-[2-(2-amino-ethoxy)-ethoxy]-acetyl-Gamma-Glutamic acid-CO-(CH2)16-CO2H
  SITE 20: note = Alpha-methyl-L-leucine
  SITE 21: note = L-isovaline
  SITE 24: note = D-Glutamic acid
  SITE 25: note = Alpha-methyl-L-tyrosine

SEQ ID NO: 1066 - protein, 39 aa, synthetic construct; identical to SEQ ID NO: 95
  SITE 2: note = 2-aminoisobutyric acid
  SITE 6: note = (S)-2-amino-3-(2-fluorophenyl)-2-methylpropanoic acid
  SITE 10: note = 3-(4-pyridyl)-L-alanine
  SITE 11: note = Alpha-methyl-L-serine
  SITE 13: note = Alpha-methyl-L-leucine
  SITE 16: note = Ornithine
  SITE 17: note = Lysine is chemically modified through conjugation of the side chain with 2-[2-(2-amino-ethoxy)-ethoxy]-acetyl-Gamma-Glutamic acid-CO-(CH2)16-CO2H
  SITE 20: note = Alpha-methyl-L-leucine
  SITE 21: note = Ornithine
  SITE 24: note = D-Glutamic acid
  SITE 25: note = Alpha-methyl-L-tyrosine

SEQ ID NO: 1067 - protein, 39 aa, synthetic construct; identical to SEQ ID NO: 95
  SITE 2: note = 2-aminoisobutyric acid
  SITE 6: note = (S)-2-amino-3-(2-fluorophenyl)-2-methylpropanoic acid
  SITE 10: note = 3-(4-pyridyl)-L-alanine
  SITE 11: note = Alpha-methyl-L-serine
  SITE 13: note = Alpha-methyl-L-leucine
  SITE 16: note = Ornithine
  SITE 17: note = Lysine is chemically modified through conjugation of the side chain with 2-[2-(2-amino-ethoxy)-ethoxy]-acetyl-Gamma-Glutamic acid-CO-(CH2)16-CO2H
  SITE 20: note = Alpha-methyl-L-leucine
  SITE 21: note = L-isovaline
  SITE 24: note = D-Glutamic acid
  SITE 25: note = Alpha-methyl-L-tyrosine

SEQ ID NO: 1068 - protein, 39 aa, synthetic construct; identical to SEQ ID NO: 1015
  SITE 2: note = 2-aminoisobutyric acid
  SITE 6: note = (S)-2-amino-3-(2-fluorophenyl)-2-methylpropanoic acid
  SITE 11: note = Alpha-methyl-L-serine
  SITE 13: note = Alpha-methyl-L-leucine
  SITE 16: note = Ornithine
  SITE 17: note = Lysine is chemically modified through conjugation of the side chain with (2-[2-(2-amino-ethoxy)-ethoxy]-acetyl)2-Gamma-Glutamic acid-CO-(CH2)16-CO2H
  SITE 20: note = Alpha-methyl-L-3-(4-pyridyl)-L-alanine
  SITE 25: note = Alpha-methyl-L-tyrosine

SEQ ID NO: 1069 - protein, 39 aa, synthetic construct; identical to SEQ ID NO: 1015
  SITE 2: note = 2-aminoisobutyric acid
  SITE 6: note = (S)-2-amino-3-(2-fluorophenyl)-2-methylpropanoic acid
  SITE 11: note = Alpha-methyl-L-serine
  SITE 13: note = Alpha-methyl-L-leucine
  SITE 16: note = Ornithine
  SITE 17: note = Lysine is chemically modified through conjugation of the side chain with 2-[2-(2-amino-ethoxy)-ethoxy]-acetyl-Gamma-Glutamic acid-CO-(CH2)16-CO2H
  SITE 20: note = Alpha-methyl-L-3-(4-pyridyl)-L-alanine
  SITE 25: note = Alpha-methyl-L-tyrosine

SEQ ID NO: 1070 - protein, 39 aa, synthetic construct; identical to SEQ ID NO: 1016
  SITE 2: note = 2-aminoisobutyric acid
  SITE 6: note = (S)-2-amino-3-(2-fluorophenyl)-2-methylpropanoic acid
  SITE 11: note = Alpha-methyl-L-serine
  SITE 13: note = Alpha-methyl-L-leucine
  SITE 16: note = Ornithine
  SITE 17: note = Lysine is chemically modified through conjugation of the side chain with (2-[2-(2-amino-ethoxy)-ethoxy]-acetyl)2-Gamma-Glutamic acid-CO-(CH2)16-CO2H
  SITE 20: note = Alpha-methyl-L-3-(4-pyridyl)-L-alanine
  SITE 25: note = Alpha-methyl-L-tyrosine
  SITE 29: note = D-Alanine

SEQ ID NO: 1071 - protein, 39 aa, synthetic construct; identical to SEQ ID NO: 1015
  SITE 2: note = 2-aminoisobutyric acid
  SITE 6: note = (S)-2-amino-3-(2-fluorophenyl)-2-methylpropanoic acid
  SITE 11: note = Alpha-methyl-L-serine
  SITE 13: note = Alpha-methyl-L-leucine
  SITE 16: note = Ornithine
  SITE 17: note = Lysine is chemically modified through conjugation of the side chain with 2-[2-(2-amino-ethoxy)-ethoxy]-acetyl-Gamma-Glutamic acid-CO-(CH2)16-CO2H
  SITE 20: note = Alpha-methyl-L-3-(4-pyridyl)-L-alanine
  SITE 24: note = D-Glutamic acid
  SITE 25: note = Alpha-methyl-L-tyrosine

SEQ ID NO: 1072 - protein, 39 aa, synthetic construct; identical to SEQ ID NO: 1018
  SITE 2: note = D-Alanine
  SITE 6: note = (S)-2-amino-3-(2-fluorophenyl)-2-methylpropanoic acid
  SITE 11: note = Alpha-methyl-L-serine
  SITE 13: note = Alpha-methyl-L-leucine
  SITE 16: note = Ornithine
  SITE 17: note = Lysine is chemically modified through conjugation of the side chain with (2-[2-(2-amino-ethoxy)-ethoxy]-acetyl)2-Gamma-Glutamic acid-CO-(CH2)16-CO2H
  SITE 20: note = Alpha-methyl-L-3-(4-pyridyl)-L-alanine
  SITE 21: note = Ornithine
  SITE 25: note = Alpha-methyl-L-tyrosine

SEQ ID NO: 1073 - protein, 39 aa, synthetic construct; identical to SEQ ID NO: 1019
  SITE 2: note = 2-aminoisobutyric acid
  SITE 6: note = (S)-2-amino-3-(2-fluorophenyl)-2-methylpropanoic acid
  SITE 11: note = Alpha-methyl-L-serine
  SITE 13: note = Alpha-methyl-L-leucine
  SITE 16: note = Ornithine
  SITE 17: note = Lysine is chemically modified through conjugation of the side chain with 2-[2-(2-amino-ethoxy)-ethoxy]-acetyl-Gamma-Glutamic acid-CO-(CH2)16-CO2H
  SITE 20: note = 2-aminoisobutyric acid
  SITE 21: note = Ornithine
  SITE 24: note = D-Glutamic acid
  SITE 25: note = Alpha-methyl-L-tyrosine

SEQ ID NO: 1074 - protein, 39 aa, synthetic construct; identical to SEQ ID NO: 1020
  SITE 2: note = D-Alanine
  SITE 6: note = (S)-2-amino-3-(2-fluorophenyl)-2-methylpropanoic acid
  SITE 11: note = Alpha-methyl-L-serine
  SITE 13: note = Alpha-methyl-L-leucine
  SITE 16: note = Ornithine
  SITE 17: note = Lysine is chemically modified through conjugation of the side chain with (2-[2-(2-amino-ethoxy)-ethoxy]-acetyl)2-Gamma-Glutamic acid-CO-(CH2)16-CO2H
  SITE 20: note = Alpha-methyl-L-3-(4-pyridyl)-L-alanine
  SITE 21: note = Ornithine
  SITE 25: note = Alpha-methyl-L-tyrosine
  SITE 29: note = D-Alanine

SEQ ID NO: 1075 - protein, 39 aa, synthetic construct; identical to SEQ ID NO: 1021
  SITE 2: note = 2-aminoisobutyric acid
  SITE 6: note = (S)-2-amino-3-(2-fluorophenyl)-2-methylpropanoic acid
  SITE 11: note = Alpha-methyl-L-serine
  SITE 13: note = Alpha-methyl-L-leucine
  SITE 16: note = Ornithine
  SITE 17: note = Lysine is chemically modified through conjugation of the side chain with (2-[2-(2-amino-ethoxy)-ethoxy]-acetyl)2-Gamma-Glutamic acid-CO-(CH2)16-CO2H
  SITE 20: note = Alpha-methyl-L-3-(4-pyridyl)-L-alanine
  SITE 25: note = Alpha-methyl-L-tyrosine

SEQ ID NO: 1076 - protein, 39 aa, synthetic construct; identical to SEQ ID NO: 1021
  SITE 2: note = 2-aminoisobutyric acid
  SITE 6: note = (S)-2-amino-3-(2-fluorophenyl)-2-methylpropanoic acid
  SITE 11: note = Alpha-methyl-L-serine
  SITE 13: note = Alpha-methyl-L-leucine
  SITE 16: note = Ornithine
  SITE 17: note = Lysine is chemically modified through conjugation of the side chain with (2-[2-(2-amino-ethoxy)-ethoxy]-acetyl)2-Gamma-Glutamic acid-CO-(CH2)16-CO2H
  SITE 20: note = 2-aminoisobutyric acid
  SITE 25: note = Alpha-methyl-L-tyrosine

SEQ ID NO: 1077 - protein, 39 aa, synthetic construct; identical to SEQ ID NO: 1023
  SITE 2: note = 2-aminoisobutyric acid
  SITE 6: note = (S)-2-amino-3-(2-fluorophenyl)-2-methylpropanoic acid
  SITE 11: note = Alpha-methyl-L-serine
  SITE 13: note = Alpha-methyl-L-leucine
  SITE 16: note = Ornithine
  SITE 17: note = Lysine is chemically modified through conjugation of the side chain with (2-[2-(2-amino-ethoxy)-ethoxy]-acetyl)2-Gamma-Glutamic acid-CO-(CH2)16-CO2H
  SITE 20: note = 3-(4-pyridyl)-L-alanine
  SITE 25: note = Alpha-methyl-L-tyrosine

SEQ ID NO: 1078 - protein, 39 aa, synthetic construct; identical to SEQ ID NO: 97
  SITE 2: note = 2-aminoisobutyric acid
  SITE 6: note = (S)-2-amino-3-(2-fluorophenyl)-2-methylpropanoic acid
  SITE 11: note = Alpha-methyl-L-serine
  SITE 13: note = Alpha-methyl-L-leucine
  SITE 16: note = Ornithine
  SITE 17: note = Lysine is chemically modified through conjugation of the side chain with 2-[2-(2-amino-ethoxy)-ethoxy]-acetyl-Gamma-Glutamic acid-CO-(CH2)16-CO2H
  SITE 20: note = Alpha-methyl-L-phenylalanine
  SITE 21: note = 2-aminoisobutyric acid
  SITE 24: note = D-Glutamic acid
  SITE 25: note = Alpha-methyl-L-tyrosine

SEQ ID NO: 1079 - protein, 39 aa, synthetic construct; identical to SEQ ID NO: 1023
  SITE 2: note = 2-aminoisobutyric acid
  SITE 6: note = (S)-2-amino-3-(2-fluorophenyl)-2-methylpropanoic acid
  SITE 11: note = Alpha-methyl-L-serine
  SITE 13: note = Alpha-methyl-L-leucine
  SITE 16: note = Ornithine
  SITE 17: note = Lysine is chemically modified through conjugation of the side chain with 2-[2-(2-amino-ethoxy)-ethoxy]-acetyl-Gamma-Glutamic acid-CO-(CH2)16-CO2H
  SITE 20: note = L-isovaline
  SITE 24: note = D-Glutamic acid
  SITE 25: note = Alpha-methyl-L-tyrosine

SEQ ID NO: 1080 - protein, 39 aa, synthetic construct; identical to SEQ ID NO: 113
  SITE 2: note = 2-aminoisobutyric acid
  SITE 6: note = (S)-2-amino-3-(2-fluorophenyl)-2-methylpropanoic acid
  SITE 11: note = Alpha-methyl-L-serine
  SITE 13: note = Alpha-methyl-L-leucine
  SITE 16: note = Ornithine
  SITE 17: note = Lysine is chemically modified through conjugation of the side chain with (2-[2-(2-amino-ethoxy)-ethoxy]-acetyl)2-Gamma-Glutamic acid-CO-(CH2)16-CO2H
  SITE 20: note = 2-aminoisobutyric acid
  SITE 25: note = Alpha-methyl-L-tyrosine

SEQ ID NO: 1081 - protein, 39 aa, synthetic construct; identical to SEQ ID NO: 131
  SITE 2: note = 2-aminoisobutyric acid
  SITE 6: note = (S)-2-amino-3-(2-fluorophenyl)-2-methylpropanoic acid
  SITE 11: note = Alpha-methyl-L-serine
  SITE 13: note = Alpha-methyl-L-leucine
  SITE 16: note = Ornithine
  SITE 17: note = Lysine is chemically modified through conjugation of the side chain with 2-[2-(2-amino-ethoxy)-ethoxy]-acetyl-Gamma-Glutamic acid-CO-(CH2)16-CO2H
  SITE 20: note = Alpha-methyl-L-3-(4-pyridyl)-L-alanine
  SITE 24: note = D-Glutamic acid
  SITE 25: note = Alpha-methyl-L-tyrosine
  SITE 29: note = 2-aminoisobutyric acid

SEQ ID NO: 1082 - protein, 39 aa, synthetic construct; identical to SEQ ID NO: 1028
  SITE 2: note = 2-aminoisobutyric acid
  SITE 6: note = (S)-2-amino-3-(2-fluorophenyl)-2-methylpropanoic acid
  SITE 11: note = Alpha-methyl-L-serine
  SITE 13: note = Alpha-methyl-L-leucine
  SITE 16: note = Ornithine
  SITE 17: note = Lysine is chemically modified through conjugation of the side chain with 2-[2-(2-amino-ethoxy)-ethoxy]-acetyl-Gamma-Glutamic acid-CO-(CH2)16-CO2H
  SITE 20: note = Alpha-methyl-L-leucine
  SITE 21: note = Ornithine
  SITE 24: note = D-Glutamic acid
  SITE 25: note = Alpha-methyl-L-tyrosine
  SITE 29: note = D-Alanine

SEQ ID NO: 1083 - protein, 39 aa, synthetic construct; identical to SEQ ID NO: 133
  SITE 2: note = 2-aminoisobutyric acid
  SITE 6: note = (S)-2-amino-3-(2-fluorophenyl)-2-methylpropanoic acid
  SITE 10: note = 3-(4-pyridyl)-L-alanine
  SITE 11: note = Alpha-methyl-L-serine
  SITE 13: note = Alpha-methyl-L-leucine
  SITE 16: note = Ornithine
  SITE 17: note = Lysine is chemically modified through conjugation of the side chain with 2-[2-(2-amino-ethoxy)-ethoxy]-acetyl-Gamma-Glutamic acid-CO-(CH2)16-CO2H
  SITE 20: note = Alpha-methyl-L-3-(4-pyridyl)-L-alanine
  SITE 25: note = Alpha-methyl-L-tyrosine
  SITE 29: note = 2-aminoisobutyric acid

SEQ ID NO: 1084 - protein, 39 aa, synthetic construct; identical to SEQ ID NO: 1029
  SITE 2: note = 2-aminoisobutyric acid
  SITE 6: note = (S)-2-amino-3-(2-fluorophenyl)-2-methylpropanoic acid
  SITE 10: note = 3-(4-pyridyl)-L-alanine
  SITE 11: note = Alpha-methyl-L-serine
  SITE 13: note = Alpha-methyl-L-leucine
  SITE 16: note = Ornithine
  SITE 17: note = Lysine is chemically modified through conjugation of the side chain with 2-[2-(2-amino-ethoxy)-ethoxy]-acetyl-Gamma-Glutamic acid-CO-(CH2)16-CO2H
  SITE 20: note = Alpha-methyl-L-3-(4-pyridyl)-L-alanine
  SITE 25: note = Alpha-methyl-L-tyrosine

SEQ ID NO: 1085 - protein, 39 aa, synthetic construct; identical to SEQ ID NO: 1030
  SITE 2: note = 2-aminoisobutyric acid
  SITE 6: note = (S)-2-amino-3-(2-fluorophenyl)-2-methylpropanoic acid
  SITE 10: note = 3-(4-pyridyl)-L-alanine
  SITE 11: note = Alpha-methyl-L-serine
  SITE 13: note = Alpha-methyl-L-leucine
  SITE 16: note = Ornithine
  SITE 17: note = Lysine is chemically modified through conjugation of the side chain with 2-[2-(2-amino-ethoxy)-ethoxy]-acetyl-Gamma-Glutamic acid-CO-(CH2)16-CO2H
  SITE 20: note = Alpha-methyl-L-3-(4-pyridyl)-L-alanine
  SITE 25: note = Alpha-methyl-L-tyrosine
  SITE 29: note = D-Alanine

SEQ ID NO: 1086 - protein, 39 aa, synthetic construct; identical to SEQ ID NO: 1031
  SITE 2: note = 2-aminoisobutyric acid
  SITE 6: note = (S)-2-amino-3-(2-fluorophenyl)-2-methylpropanoic acid
  SITE 10: note = 3-(4-pyridyl)-L-alanine
  SITE 11: note = Alpha-methyl-L-serine
  SITE 13: note = Alpha-methyl-L-leucine
  SITE 16: note = Ornithine
  SITE 17: note = Lysine is chemically modified through conjugation of the side chain with 2-[2-(2-amino-ethoxy)-ethoxy]-acetyl-Gamma-Glutamic acid-CO-(CH2)16-CO2H
  SITE 20: note = Alpha-methyl-L-leucine
  SITE 21: note = L-isovaline
  SITE 24: note = D-Glutamic acid
  SITE 25: note = Alpha-methyl-L-tyrosine
  SITE 29: note = 2-aminoisobutyric acid

SEQ ID NO: 1087 - protein, 39 aa, synthetic construct; identical to SEQ ID NO: 1032
  SITE 2: note = 2-aminoisobutyric acid
  SITE 6: note = (S)-2-amino-3-(2-fluorophenyl)-2-methylpropanoic acid
  SITE 10: note = 3-(4-pyridyl)-L-alanine
  SITE 11: note = Alpha-methyl-L-serine
  SITE 13: note = Alpha-methyl-L-leucine
  SITE 16: note = Ornithine
  SITE 17: note = Lysine is chemically modified through conjugation of the side chain with (2-[2-(2-amino-ethoxy)-ethoxy]-acetyl)2-Gamma-Glutamic acid-CO-(CH2)16-CO2H
  SITE 20: note = Alpha-methyl-L-3-(4-pyridyl)-L-alanine
  SITE 25: note = Alpha-methyl-L-tyrosine

SEQ ID NO: 1088 - protein, 39 aa, synthetic construct; identical to SEQ ID NO: 1033
  SITE 2: note = 2-aminoisobutyric acid
  SITE 6: note = (S)-2-amino-3-(2-fluorophenyl)-2-methylpropanoic acid
  SITE 10: note = 3-(4-pyridyl)-L-alanine
  SITE 11: note = Alpha-methyl-L-serine
  SITE 13: note = Alpha-methyl-L-leucine
  SITE 16: note = Ornithine
  SITE 17: note = Lysine is chemically modified through conjugation of the side chain with (2-[2-(2-amino-ethoxy)-ethoxy]-acetyl)2-Gamma-Glutamic acid-CO-(CH2)16-CO2H
  SITE 20: note = Alpha-methyl-L-3-(4-pyridyl)-L-alanine
  SITE 25: note = Alpha-methyl-L-tyrosine
  SITE 29: note = 2-aminoisobutyric acid

SEQ ID NO: 1089 - protein, 31 aa, synthetic construct; identical to SEQ ID NO: 1034
  SITE 2: note = 2-aminoisobutyric acid
  SITE 6: note = (S)-2-amino-3-(2-fluorophenyl)-2-methylpropanoic acid
  SITE 11: note = Alpha-methyl-L-serine
  SITE 13: note = Alpha-methyl-L-leucine
  SITE 16: note = Ornithine
  SITE 17: note = Lysine is chemically modified through conjugation of the side chain with (2-[2-(2-amino-ethoxy)-ethoxy]-acetyl)2-Gamma-Glutamic acid-CO-(CH2)16-CO2H
  SITE 20: note = Alpha-methyl-L-3-(4-pyridyl)-L-alanine
  SITE 25: note = Alpha-methyl-L-tyrosine

SEQ ID NO: 1090 - protein, 31 aa, synthetic construct; identical to SEQ ID NO: 1035
  SITE 2: note = 2-aminoisobutyric acid
  SITE 6: note = (S)-2-amino-3-(2-fluorophenyl)-2-methylpropanoic acid
  SITE 11: note = Alpha-methyl-L-serine
  SITE 13: note = Alpha-methyl-L-leucine
  SITE 16: note = Ornithine
  SITE 17: note = Lysine is chemically modified through conjugation of the side chain with (2-[2-(2-amino-ethoxy)-ethoxy]-acetyl)2-Gamma-Glutamic acid-CO-(CH2)16-CO2H
  SITE 20: note = Alpha-methyl-L-3-(4-pyridyl)-L-alanine
  SITE 25: note = Alpha-methyl-L-tyrosine

SEQ ID NO: 1091 - protein, 31 aa, synthetic construct; identical to SEQ ID NO: 1034
  SITE 2: note = 2-aminoisobutyric acid
  SITE 6: note = (S)-2-amino-3-(2-fluorophenyl)-2-methylpropanoic acid
  SITE 11: note = Alpha-methyl-L-serine
  SITE 13: note = Alpha-methyl-L-leucine
  SITE 16: note = Ornithine
  SITE 17: note = Lysine is chemically modified through conjugation of the side chain with 2-[2-(2-amino-ethoxy)-ethoxy]-acetyl-Gamma-Glutamic acid-CO-(CH2)16-CO2H
  SITE 20: note = Alpha-methyl-L-3-(4-pyridyl)-L-alanine
  SITE 25: note = Alpha-methyl-L-tyrosine

SEQ ID NO: 1092 - protein, 31 aa, synthetic construct; identical to SEQ ID NO: 1034
  SITE 2: note = 2-aminoisobutyric acid
  SITE 6: note = (S)-2-amino-3-(2-fluorophenyl)-2-methylpropanoic acid
  SITE 11: note = Alpha-methyl-L-serine
  SITE 13: note = Alpha-methyl-L-leucine
  SITE 16: note = Ornithine
  SITE 17: note = Lysine is chemically modified through conjugation of the side chain with 2-[2-(2-amino-ethoxy)-ethoxy]-acetyl-Gamma-Glutamic acid-CO-(CH2)16-CO2H
  SITE 20: note = Alpha-methyl-L-3-(4-pyridyl)-L-alanine
  SITE 24: note = D-Glutamic acid
  SITE 25: note = Alpha-methyl-L-tyrosine

SEQ ID NO: 1093 - protein, 31 aa, synthetic construct; identical to SEQ ID NO: 1034
  SITE 2: note = 1-Aminocyclobutane-1-carboxylic acid
  SITE 6: note = (S)-2-amino-3-(2-fluorophenyl)-2-methylpropanoic acid
  SITE 11: note = Alpha-methyl-L-serine
  SITE 13: note = Alpha-methyl-L-leucine
  SITE 16: note = Ornithine
  SITE 17: note = Lysine is chemically modified through conjugation of the side chain with 2-[2-(2-amino-ethoxy)-ethoxy]-acetyl-Gamma-Glutamic acid-CO-(CH2)16-CO2H
  SITE 20: note = Alpha-methyl-L-3-(4-pyridyl)-L-alanine
  SITE 25: note = Alpha-methyl-L-tyrosine

SEQ ID NO: 1094 - protein, 31 aa, synthetic construct; identical to SEQ ID NO: 1038
  SITE 2: note = 2-aminoisobutyric acid
  SITE 6: note = (S)-2-amino-3-(2-fluorophenyl)-2-methylpropanoic acid
  SITE 10: note = 3-(4-pyridyl)-L-alanine
  SITE 11: note = Alpha-methyl-L-serine
  SITE 13: note = Alpha-methyl-L-leucine
  SITE 16: note = Ornithine
  SITE 17: note = Lysine is chemically modified through conjugation of the side chain with 2-[2-(2-amino-ethoxy)-ethoxy]-acetyl-Gamma-Glutamic acid-CO-(CH2)16-CO2H
  SITE 20: note = Alpha-methyl-L-3-(4-pyridyl)-L-alanine
  SITE 25: note = Alpha-methyl-L-tyrosine

SEQ ID NO: 1095 - protein, 39 aa, synthetic construct; identical to SEQ ID NO: 113
  SITE 2: note = 2-aminoisobutyric acid
  SITE 6: note = (S)-2-amino-3-(2-fluorophenyl)-2-methylpropanoic acid
  SITE 11: note = Alpha-methyl-L-serine
  SITE 13: note = Alpha-methyl-L-leucine
  SITE 16: note = Ornithine
  SITE 17: note = Lysine is chemically modified through conjugation of the side chain with (2-[2-(2-amino-ethoxy)-ethoxy]-acetyl)2-Gamma-Glutamic acid-CO-(CH2)14-CO2H
  SITE 20: note = Alpha-methyl-L-3-(4-pyridyl)-L-alanine
  SITE 25: note = Alpha-methyl-L-tyrosine

SEQ ID NO: 1096 - protein, 39 aa, synthetic construct; identical to SEQ ID NO: 130
  SITE 2: note = 2-aminoisobutyric acid
  SITE 6: note = (S)-2-amino-3-(2-fluorophenyl)-2-methylpropanoic acid
  SITE 10: note = 3-(4-pyridyl)-L-alanine
  SITE 11: note = Alpha-methyl-L-serine
  SITE 13: note = Alpha-methyl-L-leucine
  SITE 16: note = Ornithine
  SITE 17: note = Lysine is chemically modified through conjugation of the side chain with 2-[2-(2-amino-ethoxy)-ethoxy]-acetyl-Gamma-Glutamic acid-CO-(CH2)14-CO2H
  SITE 20: note = Alpha-methyl-L-3-(4-pyridyl)-L-alanine
  SITE 25: note = Alpha-methyl-L-tyrosine

SEQ ID NO: 1097 - protein, 39 aa, synthetic construct; identical to SEQ ID NO: 113
  SITE 2: note = 2-aminoisobutyric acid
  SITE 6: note = (S)-2-amino-3-(2-fluorophenyl)-2-methylpropanoic acid
  SITE 11: note = Alpha-methyl-L-serine
  SITE 13: note = Alpha-methyl-L-leucine
  SITE 16: note = Ornithine
  SITE 17: note = Lysine is chemically modified through conjugation of the side chain with 2-[2-(2-amino-ethoxy)-ethoxy]-acetyl-Gamma-Glutamic acid-CO-(CH2)14-CO2H
  SITE 20: note = Alpha-methyl-L-3-(4-pyridyl)-L-alanine
  SITE 25: note = Alpha-methyl-L-tyrosine

SEQ ID NO: 1098 - protein, 39 aa, synthetic construct; identical to SEQ ID NO: 130
  SITE 2: note = 2-aminoisobutyric acid
  SITE 6: note = (S)-2-amino-3-(2-fluorophenyl)-2-methylpropanoic acid
  SITE 10: note = 3-(4-pyridyl)-L-alanine
  SITE 11: note = Alpha-methyl-L-serine
  SITE 13: note = Alpha-methyl-L-leucine
  SITE 16: note = Ornithine
  SITE 17: note = Lysine is chemically modified through conjugation of the side chain with 2-[2-(2-amino-ethoxy)-ethoxy]-acetyl-Gamma-Glutamic acid-CO-(CH2)14-CO2H
  SITE 20: note = Alpha-methyl-L-3-(4-pyridyl)-L-alanine
  SITE 24: note = D-Glutamic acid
  SITE 25: note = Alpha-methyl-L-tyrosine

SEQ ID NO: 1099 - protein, 40 aa, synthetic construct; identical to SEQ ID NO: 459
  SITE 2: note = 2-aminoisobutyric acid
  SITE 6: note = (S)-2-amino-3-(2-fluorophenyl)-2-methylpropanoic acid
  SITE 10: note = 3-(4-pyridyl)-L-alanine
  SITE 13: note = Alpha-methyl-L-leucine
  SITE 17: note = Lysine is chemically modified through conjugation of the side chain with (2-[2-(2-amino-ethoxy)-ethoxy]-acetyl)2-Gamma-Glutamic acid-CO-(CH2)16-CO2H
  SITE 20: note = 2-aminoisobutyric acid
  SITE 24: note = D-Glutamic acid
  SITE 25: note = Alpha-methyl-L-tyrosine
  SITE 40: note = Lysine amide is chemically modified through conjugation of the side chain with 24x Polyethylene glycol attached to 4-acetylbenzaldehyde (dCAP) which is attached to two Fc sequences

SEQ ID NO: 1100 - protein, 40 aa, synthetic construct; identical to SEQ ID NO: 628
  SITE 2: note = 2-aminoisobutyric acid
  SITE 6: note = (S)-2-amino-3-(2-fluorophenyl)-2-methylpropanoic acid
  SITE 11: note = 2-aminoisobutyric acid
  SITE 13: note = Alpha-methyl-L-leucine
  SITE 16: note = Ornithine
  SITE 17: note = Lysine is chemically modified through conjugation of the side chain with (2-[2-(2-amino-ethoxy)-ethoxy]-acetyl)2-Gamma-Glutamic acid-CO-(CH2)16-CO2H
  SITE 20: note = 2-aminoisobutyric acid
  SITE 25: note = Alpha-methyl-L-tyrosine
  SITE 40: note = Lysine amide is chemically modified through conjugation of the side chain with 24x Polyethylene glycol-N,N-bis(2-(2-(2-(2-(4-(1H-tetrazol-1-yl)phenoxy)etho xy)ethoxy)acetamido)ethyl)-4-oxobutanamide (BEA-MSPT2) which is attached to two Fc sequences

SEQ ID NO: 1101 - protein, 40 aa, synthetic construct; identical to SEQ ID NO: 827
  SITE 2: note = 2-aminoisobutyric acid
  SITE 6: note = (S)-2-amino-3-(2-fluorophenyl)-2-methylpropanoic acid
  SITE 11: note = Alpha-methyl-L-serine
  SITE 13: note = Alpha-methyl-L-leucine
  SITE 16: note = Ornithine
  SITE 17: note = Lysine is chemically modified through conjugation of the side chain with (2-[2-(2-amino-ethoxy)-ethoxy]-acetyl)2-Gamma-Glutamic acid-CO-(CH2)16-CO2H
  SITE 20: note = Alpha-methyl-L-3-(4-pyridyl)-L-alanine
  SITE 25: note = Alpha-methyl-L-tyrosine
  SITE 40: note = Lysine amide is chemically modified through conjugation of the side chain with 24x Polyethylene glycol-N,N-bis(2-(2-(2-(2-(4-(1H-tetrazol-1-yl)phenoxy)etho xy)ethoxy)acetamido)ethyl)-4-oxobutanamide (BEA-MSPT2) which is attached to two Fc sequences

SEQ ID NO: 1102 - protein, 40 aa, synthetic construct; identical to SEQ ID NO: 845
  SITE 2: note = 2-aminoisobutyric acid
  SITE 6: note = (S)-2-amino-3-(2-fluorophenyl)-2-methylpropanoic acid
  SITE 10: note = 3-(4-pyridyl)-L-alanine
  SITE 11: note = Alpha-methyl-L-serine
  SITE 13: note = Alpha-methyl-L-leucine
  SITE 16: note = Ornithine
  SITE 17: note = Lysine is chemically modified through conjugation of the side chain with 2-[2-(2-amino-ethoxy)-ethoxy]-acetyl-Gamma-Glutamic acid-CO-(CH2)16-CO2H
  SITE 20: note = Alpha-methyl-L-3-(4-pyridyl)-L-alanine
  SITE 25: note = Alpha-methyl-L-tyrosine
  SITE 40: note = Lysine amide is chemically modified through conjugation of the side chain with 24x Polyethylene glycol-N,N-bis(2-(2-(2-(2-(4-(1H-tetrazol-1-yl)phenoxy)etho xy)ethoxy)acetamido)ethyl)-4-oxobutanamide (BEA-MSPT2) which is attached to two Fc sequences

SEQ ID NO: 1103 - protein, 40 aa, synthetic construct; identical to SEQ ID NO: 827
  SITE 2: note = 2-aminoisobutyric acid
  SITE 6: note = (S)-2-amino-3-(2-fluorophenyl)-2-methylpropanoic acid
  SITE 11: note = Alpha-methyl-L-serine
  SITE 13: note = Alpha-methyl-L-leucine
  SITE 16: note = Ornithine
  SITE 17: note = Lysine is chemically modified through conjugation of the side chain with 2-[2-(2-amino-ethoxy)-ethoxy]-acetyl-Gamma-Glutamic acid-CO-(CH2)16-CO2H
  SITE 20: note = Alpha-methyl-L-3-(4-pyridyl)-L-alanine
  SITE 24: note = D-Glutamic acid
  SITE 25: note = Alpha-methyl-L-tyrosine
  SITE 40: note = Lysine amide is chemically modified through conjugation of the side chain with 24x Polyethylene glycol-N,N-bis(2-(2-(2-(2-(4-(1H-tetrazol-1-yl)phenoxy)etho xy)ethoxy)acetamido)ethyl)-4-oxobutanamide (BEA-MSPT2) which is attached to two Fc sequences

SEQ ID NO: 1104 - protein, 40 aa, synthetic construct; identical to SEQ ID NO: 845
  SITE 2: note = 2-aminoisobutyric acid
  SITE 6: note = (S)-2-amino-3-(2-fluorophenyl)-2-methylpropanoic acid
  SITE 10: note = 3-(4-pyridyl)-L-alanine
  SITE 11: note = Alpha-methyl-L-serine
  SITE 13: note = Alpha-methyl-L-leucine
  SITE 16: note = Ornithine
  SITE 17: note = Lysine is chemically modified through conjugation of the side chain with 2-[2-(2-amino-ethoxy)-ethoxy]-acetyl-Gamma-Glutamic acid-CO-(CH2)16-CO2H
  SITE 20: note = Alpha-methyl-L-3-(4-pyridyl)-L-alanine
  SITE 24: note = D-Glutamic acid
  SITE 25: note = Alpha-methyl-L-tyrosine
  SITE 40: note = Lysine amide is chemically modified through conjugation of the side chain with 24x Polyethylene glycol-N,N-bis(2-(2-(2-(2-(4-(1H-tetrazol-1-yl)phenoxy)etho xy)ethoxy)acetamido)ethyl)-4-oxobutanamide (BEA-MSPT2) which is attached to two Fc sequences

SEQ ID NO: 1105 - protein, 47 aa, synthetic construct
  SITE 2: note = 2-aminoisobutyric acid
  SITE 6: note = (S)-2-amino-3-(2-fluorophenyl)-2-methylpropanoic acid
  SITE 10: note = 3-(4-pyridyl)-L-alanine
  SITE 11: note = 2-aminoisobutyric acid
  SITE 13: note = Alpha-methyl-L-leucine
  SITE 16: note = Ornithine
  SITE 20: note = 2-aminoisobutyric acid
  SITE 24: note = D-Glutamic acid
  SITE 25: note = Alpha-methyl-L-tyrosine
  SITE 47: note = Lysine amide is chemically modified through conjugation of the side chain with (6S,16S)-6,16-bis(aminomethyl)-4,7,15,18-tetraoxo-11-(4-oxo butanoyl)-5,8,11,14,17-pentaazahenicosanedioic acid (BEA-MalDap2) which is attached to two Fc sequences
YXEGTXTSDXXIXLDXQAQXEFIEXLIEGGGGGGGSGGGGSGGGGSK

SEQ ID NO: 1106 - protein, 40 aa, synthetic construct
  SITE 2: note = 2-aminoisobutyric acid
  SITE 6: note = (S)-2-amino-3-(2-fluorophenyl)-2-methylpropanoic acid
  SITE 11: note = 2-aminoisobutyric acid
  SITE 13: note = Alpha-methyl-L-leucine
  SITE 16: note = Ornithine
  SITE 17: note = Lysine is chemically modified through conjugation of the side chain with (2-[2-(2-amino-ethoxy)-ethoxy]-acetyl)2-Gamma-Glutamic acid-CO-(CH2)16-CO2H
  SITE 20: note = 2-aminoisobutyric acid
  SITE 21: note = Ornithine
  SITE 25: note = Alpha-methyl-L-tyrosine
  SITE 40: note = Lysine amide is chemically modified through conjugation of the side chain with 24x Polyethylene glycol-(6S,16S)-6,16-bis(aminomethyl)-4,7,15,18-tetraoxo-11 -(4-oxobutanoyl)-5,8,11,14,17-pentaazahenicosanedioic acid (BEA-MalDap2) which is attached to two Fc sequences
YXEGTXTSDYXIXLDXKAQXXFIEXLIEGSPSSGAPPPSK

SEQ ID NO: 1107 - protein, 32 aa, synthetic construct
  SITE 2: note = 2-aminoisobutyric acid
  SITE 6: note = (S)-2-amino-3-(2-fluorophenyl)-2-methylpropanoic acid
  SITE 11: note = 2-aminoisobutyric acid
  SITE 13: note = Alpha-methyl-L-leucine
  SITE 16: note = Ornithine
  SITE 17: note = Lysine is chemically modified through conjugation of the side chain with (2-[2-(2-amino-ethoxy)-ethoxy]-acetyl)2-Gamma-Glutamic acid-CO-(CH2)16-CO2H
  SITE 20: note = 2-aminoisobutyric acid
  SITE 25: note = Alpha-methyl-L-tyrosine
  SITE 32: note = Lysine amide is chemically modified through conjugation of the side chain with 24x Polyethylene glycol-N,N-bis(2-(2-(2-(2-(4-(1H-tetrazol-1-yl)phenoxy)etho xy)ethoxy)acetamido)ethyl)-4-oxobutanamide (BEA-MSPT2) which is attached to two Fc sequences
YXEGTXTSDYXIXLDXKAQXEFIEXLIAGGGK

SEQ ID NO: 1108 - protein, 32 aa, synthetic construct
  SITE 2: note = 2-aminoisobutyric acid
  SITE 6: note = (S)-2-amino-3-(2-fluorophenyl)-2-methylpropanoic acid
  SITE 11: note = 2-aminoisobutyric acid
  SITE 13: note = Alpha-methyl-L-leucine
  SITE 16: note = Ornithine
  SITE 17: note = Lysine is chemically modified through conjugation of the side chain with (2-[2-(2-amino-ethoxy)-ethoxy]-acetyl)2-Gamma-Glutamic acid-CO-(CH2)16-CO2H
  SITE 20: note = 2-aminoisobutyric acid
  SITE 25: note = Alpha-methyl-L-tyrosine
  SITE 29: note = 2-aminoisobutyric acid
  SITE 32: note = Lysine amide is chemically modified through conjugation of the side chain with 24x Polyethylene glycol-N,N-bis(2-(2-(2-(2-(4-(1H-tetrazol-1-yl)phenoxy)etho xy)ethoxy)acetamido)ethyl)-4-oxobutanamide (BEA-MSPT2) which is attached to two Fc sequences
YXEGTXTSDYXIXLDXKAQXEFIEXLIEXGGK

SEQ ID NO: 1109 - protein, 40 aa, synthetic construct; identical to SEQ ID NO: 628
  SITE 2: note = 2-aminoisobutyric acid
  SITE 6: note = (S)-2-amino-3-(2-fluorophenyl)-2-methylpropanoic acid
  SITE 11: note = 2-aminoisobutyric acid
  SITE 13: note = Alpha-methyl-L-leucine
  SITE 16: note = Ornithine
  SITE 17: note = Lysine is chemically modified through conjugation of the side chain with (2-[2-(2-amino-ethoxy)-ethoxy]-acetyl)2-Gamma-Glutamic acid-CO-(CH2)14-CO2H
  SITE 20: note = 2-aminoisobutyric acid
  SITE 25: note = Alpha-methyl-L-tyrosine
  SITE 40: note = Lysine amide is chemically modified through conjugation of the side chain with 24x Polyethylene glycol-(6S,16S)-6,16-bis(aminomethyl)-4,7,15,18-tetraoxo-11 -(4-oxobutanoyl)-5,8,11,14,17-pentaazahenicosanedioic acid (BEA-MalDap2) which is attached to two Fc sequences

SEQ ID NO: 1110 - protein, 40 aa, synthetic construct; identical to SEQ ID NO: 628
  SITE 2: note = 2-aminoisobutyric acid
  SITE 6: note = (S)-2-amino-3-(2-fluorophenyl)-2-methylpropanoic acid
  SITE 11: note = 2-aminoisobutyric acid
  SITE 13: note = Alpha-methyl-L-leucine
  SITE 16: note = Ornithine
  SITE 17: note = Lysine is chemically modified through conjugation of the side chain with (2-[2-(2-amino-ethoxy)-ethoxy]-acetyl)2-Gamma-Glutamic acid-CO-(CH2)16-CO2H
  SITE 20: note = 2-aminoisobutyric acid
  SITE 25: note = Alpha-methyl-L-tyrosine
  SITE 40: note = Lysine amide is chemically modified through conjugation of the side chain with 24x Polyethylene glycol-(7S,17S)-7,17-diamino-4,8,16,20-tetraoxo-12-(4-oxobu tanoyl)-5,9,12,15,19-pentaazatricosanedioic acid (BEA-Beta-MalDap2) which is attached to two Fc sequences

SEQ ID NO: 1111 - protein, 40 aa, synthetic construct
  SITE 2: note = 2-aminoisobutyric acid
  SITE 6: note = (S)-2-amino-3-(2-fluorophenyl)-2-methylpropanoic acid
  SITE 11: note = Alpha-methyl-L-serine
  SITE 13: note = Alpha-methyl-L-leucine
  SITE 16: note = Ornithine
  SITE 17: note = Lysine is chemically modified through conjugation of the side chain with (2-[2-(2-amino-ethoxy)-ethoxy]-acetyl)2-Gamma-Glutamic acid-CO-(CH2)16-CO2H
  SITE 20: note = Alpha-methyl-L-3-(4-pyridyl)-L-alanine
  SITE 21: note = Ornithine
  SITE 25: note = Alpha-methyl-L-tyrosine
  SITE 40: note = Lysine amide is chemically modified through conjugation of the side chain with 24x Polyethylene glycol-(6S,16S)-6,16-bis(aminomethyl)-4,7,15,18-tetraoxo-11 -(4-oxobutanoyl)-5,8,11,14,17-pentaazahenicosanedioic acid (BEA-MalDap2) which is attached to two Fc sequences
YXQGTXTSDYXIXLDXKAQXXFIEXLVEGSPSSGAPPPSK

SEQ ID NO: 1112 - protein, 40 aa, synthetic construct; identical to SEQ ID NO: 790
  SITE 2: note = 2-aminoisobutyric acid
  SITE 6: note = (S)-2-amino-3-(2-fluorophenyl)-2-methylpropanoic acid
  SITE 10: note = 3-(4-pyridyl)-L-alanine
  SITE 11: note = Alpha-methyl-L-serine
  SITE 13: note = Alpha-methyl-L-leucine
  SITE 16: note = Ornithine
  SITE 17: note = Lysine is chemically modified through conjugation of the side chain with 2-[2-(2-amino-ethoxy)-ethoxy]-acetyl-Gamma-Glutamic acid-CO-(CH2)16-CO2H
  SITE 20: note = Alpha-methyl-L-3-(4-pyridyl)-L-alanine
  SITE 21: note = Ornithine
  SITE 25: note = Alpha-methyl-L-tyrosine
  SITE 40: note = Lysine amide is chemically modified through conjugation of the side chain with 24x Polyethylene glycol-(6S,16S)-6,16-bis(aminomethyl)-4,7,15,18-tetraoxo-11 -(4-oxobutanoyl)-5,8,11,14,17-pentaazahenicosanedioic acid (BEA-MalDap2) which is attached to two Fc sequences

SEQ ID NO: 1113 - protein, 40 aa, synthetic construct
  SITE 2: note = 2-aminoisobutyric acid
  SITE 6: note = (S)-2-amino-3-(2-fluorophenyl)-2-methylpropanoic acid
  SITE 10: note = 3-(4-pyridyl)-L-alanine
  SITE 11: note = Alpha-methyl-L-serine
  SITE 13: note = Alpha-methyl-L-leucine
  SITE 16: note = Ornithine
  SITE 17: note = Lysine is chemically modified through conjugation of the side chain with 2-[2-(2-amino-ethoxy)-ethoxy]-acetyl-Gamma-Glutamic acid-CO-(CH2)16-CO2H
  SITE 20: note = Alpha-methyl-L-3-(4-pyridyl)-L-alanine
  SITE 21: note = Ornithine
  SITE 25: note = Alpha-methyl-L-tyrosine
  SITE 40: note = Lysine amide is chemically modified through conjugation of the side chain with 24x Polyethylene glycol-(6S,16S)-6,16-bis(aminomethyl)-4,7,15,18-tetraoxo-11 -(4-oxobutanoyl)-5,8,11,14,17-pentaazahenicosanedioic acid (BEA-MalDap2) which is attached to two Fc sequences
YXQGTXTSDXXIXLDXKAQXXFIEXLVEGSPSSGAPPPSK

SEQ ID NO: 1114 - protein, 40 aa, synthetic construct; identical to SEQ ID NO: 1111
  SITE 2: note = 2-aminoisobutyric acid
  SITE 6: note = (S)-2-amino-3-(2-fluorophenyl)-2-methylpropanoic acid
  SITE 11: note = Alpha-methyl-L-serine
  SITE 13: note = Alpha-methyl-L-leucine
  SITE 16: note = Ornithine
  SITE 17: note = Lysine is chemically modified through conjugation of the side chain with 2-[2-(2-amino-ethoxy)-ethoxy]-acetyl-Gamma-Glutamic acid-CO-(CH2)16-CO2H
  SITE 20: note = Alpha-methyl-L-3-(4-pyridyl)-L-alanine
  SITE 21: note = Ornithine
  SITE 25: note = Alpha-methyl-L-tyrosine
  SITE 40: note = Lysine amide is chemically modified through conjugation of the side chain with 24x Polyethylene glycol-(6S,16S)-6,16-bis(aminomethyl)-4,7,15,18-tetraoxo-11 -(4-oxobutanoyl)-5,8,11,14,17-pentaazahenicosanedioic acid (BEA-MalDap2) which is attached to two Fc sequences

SEQ ID NO: 1115 - protein, 41 aa, synthetic construct
  SITE 2: note = 2-aminoisobutyric acid
  SITE 6: note = (S)-2-amino-3-(2-fluorophenyl)-2-methylpropanoic acid
  SITE 11: note = Alpha-methyl-L-serine
  SITE 13: note = Alpha-methyl-L-leucine
  SITE 16: note = Ornithine
  SITE 17: note = Lysine is chemically modified through conjugation of the side chain with 2-[2-(2-amino-ethoxy)-ethoxy]-acetyl-Gamma-Glutamic acid-CO-(CH2)16-CO2H
  SITE 20: note = Alpha-methyl-L-3-(4-pyridyl)-L-alanine
  SITE 21: note = Ornithine
  SITE 25: note = Alpha-methyl-L-tyrosine
  SITE 41: note = Lysine amide is chemically modified through conjugation of the side chain with 24x Polyethylene glycol-(6S,16S)-6,16-bis(aminomethyl)-4,7,15,18-tetraoxo-11 -(4-oxobutanoyl)-5,8,11,14,17-pentaazahenicosanedioic acid (BEA-MalDap2) which is attached to two Fc sequences
YXQGTXTSDYXIXLDXKAQXXFIEXLIEGSPSSGAPPPSGK

SEQ ID NO: 1116 - protein, 41 aa, synthetic construct
  SITE 2: note = 2-aminoisobutyric acid
  SITE 6: note = (S)-2-amino-3-(2-fluorophenyl)-2-methylpropanoic acid
  SITE 11: note = Alpha-methyl-L-serine
  SITE 13: note = Alpha-methyl-L-leucine
  SITE 16: note = Ornithine
  SITE 17: note = Lysine is chemically modified through conjugation of the side chain with 2-[2-(2-amino-ethoxy)-ethoxy]-acetyl-Gamma-Glutamic acid-CO-(CH2)16-CO2H
  SITE 20: note = Alpha-methyl-L-3-(4-pyridyl)-L-alanine
  SITE 25: note = Alpha-methyl-L-tyrosine
  SITE 41: note = Lysine amide is chemically modified through conjugation of the side chain with 24x Polyethylene glycol-(6S,16S)-6,16-bis(aminomethyl)-4,7,15,18-tetraoxo-11 -(4-oxobutanoyl)-5,8,11,14,17-pentaazahenicosanedioic acid (BEA-MalDap2) which is attached to two Fc sequences
YXQGTXTSDYXIXLDXKAQXEFIEXLIEGSPSSGAPPPSGK

SEQ ID NO: 1117 - protein, 40 aa, synthetic construct; identical to SEQ ID NO: 788
  SITE 2: note = 2-aminoisobutyric acid
  SITE 6: note = (S)-2-amino-3-(2-fluorophenyl)-2-methylpropanoic acid
  SITE 10: note = 3-(4-pyridyl)-L-alanine
  SITE 13: note = Alpha-methyl-L-leucine
  SITE 16: note = Ornithine
  SITE 17: note = Lysine is chemically modified through conjugation of the side chain with epsilon-Lysine-epsilon-Lysine-Gamma-Glutamic acid-CO-(CH2)16-CO2H
  SITE 20: note = Alpha-methyl-L-3-(4-pyridyl)-L-alanine
  SITE 21: note = Ornithine
  SITE 25: note = Alpha-methyl-L-tyrosine
  SITE 40: note = Lysine amide is chemically modified through conjugation of the side chain with 24x Polyethylene glycol-(6S,16S)-6,16-bis(aminomethyl)-4,7,15,18-tetraoxo-11 -(4-oxobutanoyl)-5,8,11,14,17-pentaazahenicosanedioic acid (BEA-MalDap2) which is attached to two Fc sequences

SEQ ID NO: 1118 - protein, 40 aa, synthetic construct; identical to SEQ ID NO: 792
  SITE 2: note = 2-aminoisobutyric acid
  SITE 6: note = (S)-2-amino-3-(2-fluorophenyl)-2-methylpropanoic acid
  SITE 11: note = Alpha-methyl-L-serine
  SITE 13: note = Alpha-methyl-L-leucine
  SITE 16: note = Ornithine
  SITE 17: note = Lysine is chemically modified through conjugation of the side chain with epsilon-Lysine-epsilon-Lysine-Gamma-Glutamic acid-CO-(CH2)16-CO2H
  SITE 20: note = Alpha-methyl-L-3-(4-pyridyl)-L-alanine
  SITE 21: note = Ornithine
  SITE 25: note = Alpha-methyl-L-tyrosine
  SITE 40: note = Lysine amide is chemically modified through conjugation of the side chain with 24x Polyethylene glycol-(6S,16S)-6,16-bis(aminomethyl)-4,7,15,18-tetraoxo-11 -(4-oxobutanoyl)-5,8,11,14,17-pentaazahenicosanedioic acid (BEA-MalDap2) which is attached to two Fc sequences

SEQ ID NO: 1119 - protein, 40 aa, synthetic construct; identical to SEQ ID NO: 845
  SITE 2: note = 2-aminoisobutyric acid
  SITE 6: note = (S)-2-amino-3-(2-fluorophenyl)-2-methylpropanoic acid
  SITE 10: note = 3-(4-pyridyl)-L-alanine
  SITE 11: note = Alpha-methyl-L-serine
  SITE 13: note = Alpha-methyl-L-leucine
  SITE 16: note = Ornithine
  SITE 17: note = Lysine is chemically modified through conjugation of the side chain with epsilon-Lysine-epsilon-Lysine-Gamma-Glutamic acid-CO-(CH2)16-CO2H
  SITE 20: note = Alpha-methyl-L-3-(4-pyridyl)-L-alanine
  SITE 25: note = Alpha-methyl-L-tyrosine
  SITE 40: note = Lysine amide is chemically modified through conjugation of the side chain with 24x Polyethylene glycol-(6S,16S)-6,16-bis(aminomethyl)-4,7,15,18-tetraoxo-11 -(4-oxobutanoyl)-5,8,11,14,17-pentaazahenicosanedioic acid (BEA-MalDap2) which is attached to two Fc sequences

SEQ ID NO: 1120 - protein, 40 aa, synthetic construct; identical to SEQ ID NO: 827
  SITE 2: note = 2-aminoisobutyric acid
  SITE 6: note = (S)-2-amino-3-(2-fluorophenyl)-2-methylpropanoic acid
  SITE 11: note = Alpha-methyl-L-serine
  SITE 13: note = Alpha-methyl-L-leucine
  SITE 16: note = Ornithine
  SITE 17: note = Lysine is chemically modified through conjugation of the side chain with epsilon-Lysine-epsilon-Lysine-Gamma-Glutamic acid-CO-(CH2)16-CO2H
  SITE 20: note = Alpha-methyl-L-3-(4-pyridyl)-L-alanine
  SITE 25: note = Alpha-methyl-L-tyrosine
  SITE 40: note = Lysine amide is chemically modified through conjugation of the side chain with 24x Polyethylene glycol-(6S,16S)-6,16-bis(aminomethyl)-4,7,15,18-tetraoxo-11 -(4-oxobutanoyl)-5,8,11,14,17-pentaazahenicosanedioic acid (BEA-MalDap2) which is attached to two Fc sequences

SEQ ID NO: 1121 - protein, 40 aa, synthetic construct
  SITE 2: note = 2-aminoisobutyric acid
  SITE 6: note = (S)-2-amino-3-(2-fluorophenyl)-2-methylpropanoic acid
  SITE 11: note = Alpha-methyl-L-serine
  SITE 13: note = Alpha-methyl-L-leucine
  SITE 16: note = Ornithine
  SITE 17: note = Lysine is chemically modified through conjugation of the side chain with 2-[2-(2-amino-ethoxy)-ethoxy]-acetyl-Gamma-Glutamic acid-CO-(CH2)16-CO2H
  SITE 20: note = Alpha-methyl-L-3-(4-pyridyl)-L-alanine
  SITE 25: note = Alpha-methyl-L-tyrosine
  SITE 40: note = Lysine amide is chemically modified through conjugation of the side chain with 24x Polyethylene glycol-(6S,16S)-6,16-bis(aminomethyl)-4,7,15,18-tetraoxo-11 -(4-oxobutanoyl)-5,8,11,14,17-pentaazahenicosanedioic acid (BEA-MalDap2) which is attached to two Fc sequences
YXQGTXTSDYXIXLDXKAQXEFIEXLVEGSPSSGAPPPSK

SEQ ID NO: 1122 - protein, 40 aa, synthetic construct
  SITE 2: note = D-Alanine
  SITE 6: note = (S)-2-amino-3-(2-fluorophenyl)-2-methylpropanoic acid
  SITE 10: note = 3-(4-pyridyl)-L-alanine
  SITE 11: note = Alpha-methyl-L-serine
  SITE 13: note = Alpha-methyl-L-leucine
  SITE 16: note = Ornithine
  SITE 17: note = Lysine is chemically modified through conjugation of the side chain with 2-[2-(2-amino-ethoxy)-ethoxy]-acetyl-Gamma-Glutamic acid-CO-(CH2)16-CO2H
  SITE 20: note = Alpha-methyl-L-3-(4-pyridyl)-L-alanine
  SITE 21: note = Ornithine
  SITE 25: note = Alpha-methyl-L-tyrosine
  SITE 40: note = Lysine amide is chemically modified through conjugation of the side chain with 24x Polyethylene glycol-(6S,16S)-6,16-bis(aminomethyl)-4,7,15,18-tetraoxo-11 -(4-oxobutanoyl)-5,8,11,14,17-pentaazahenicosanedioic acid (BEA-MalDap2) which is attached to two Fc sequences
YAQGTXTSDXXIXLDXKAQXXFIEXLIEGSPSSGAPPPSK

SEQ ID NO: 1123 - protein, 40 aa, synthetic construct
  SITE 2: note = D-Alanine
  SITE 6: note = (S)-2-amino-3-(2-fluorophenyl)-2-methylpropanoic acid
  SITE 10: note = 3-(4-pyridyl)-L-alanine
  SITE 13: note = Alpha-methyl-L-leucine
  SITE 16: note = Ornithine
  SITE 17: note = Lysine is chemically modified through conjugation of the side chain with 2-[2-(2-amino-ethoxy)-ethoxy]-acetyl-Gamma-Glutamic acid-CO-(CH2)16-CO2H
  SITE 20: note = Alpha-methyl-L-3-(4-pyridyl)-L-alanine
  SITE 21: note = Ornithine
  SITE 25: note = Alpha-methyl-L-tyrosine
  SITE 40: note = Lysine amide is chemically modified through conjugation of the side chain with 24x Polyethylene glycol-(6S,16S)-6,16-bis(aminomethyl)-4,7,15,18-tetraoxo-11 -(4-oxobutanoyl)-5,8,11,14,17-pentaazahenicosanedioic acid (BEA-MalDap2) which is attached to two Fc sequences
YAQGTXTSDXSIXLDXKAQXXFIEXLIEGSPSSGAPPPSK

SEQ ID NO: 1124 - protein, 40 aa, synthetic construct
  SITE 2: note = D-Alanine
  SITE 6: note = (S)-2-amino-3-(2-fluorophenyl)-2-methylpropanoic acid
  SITE 11: note = Alpha-methyl-L-serine
  SITE 13: note = Alpha-methyl-L-leucine
  SITE 16: note = Ornithine
  SITE 17: note = Lysine is chemically modified through conjugation of the side chain with 2-[2-(2-amino-ethoxy)-ethoxy]-acetyl-Gamma-Glutamic acid-CO-(CH2)16-CO2H
  SITE 20: note = Alpha-methyl-L-3-(4-pyridyl)-L-alanine
  SITE 21: note = Ornithine
  SITE 25: note = Alpha-methyl-L-tyrosine
  SITE 40: note = Lysine amide is chemically modified through conjugation of the side chain with 24x Polyethylene glycol-(6S,16S)-6,16-bis(aminomethyl)-4,7,15,18-tetraoxo-11 -(4-oxobutanoyl)-5,8,11,14,17-pentaazahenicosanedioic acid (BEA-MalDap2) which is attached to two Fc sequences
YAQGTXTSDYXIXLDXKAQXXFIEXLIEQSPSSGAPPPSK

SEQ ID NO: 1125 - protein, 40 aa, synthetic construct; identical to SEQ ID NO: 792
  SITE 2: note = Alpha-methyl-L-serine
  SITE 6: note = (S)-2-amino-3-(2-fluorophenyl)-2-methylpropanoic acid
  SITE 11: note = Alpha-methyl-L-serine
  SITE 13: note = Alpha-methyl-L-leucine
  SITE 16: note = Ornithine
  SITE 17: note = Lysine is chemically modified through conjugation of the side chain with 2-[2-(2-amino-ethoxy)-ethoxy]-acetyl-Gamma-Glutamic acid-CO-(CH2)16-CO2H
  SITE 20: note = Alpha-methyl-L-3-(4-pyridyl)-L-alanine
  SITE 21: note = Ornithine
  SITE 25: note = Alpha-methyl-L-tyrosine
  SITE 40: note = Lysine amide is chemically modified through conjugation of the side chain with 24x Polyethylene glycol-(6S,16S)-6,16-bis(aminomethyl)-4,7,15,18-tetraoxo-11 -(4-oxobutanoyl)-5,8,11,14,17-pentaazahenicosanedioic acid (BEA-MalDap2) which is attached to two Fc sequences

SEQ ID NO: 1126 - protein, 40 aa, synthetic construct; identical to SEQ ID NO: 790
  SITE 2: note = Alpha-methyl-L-serine
  SITE 6: note = (S)-2-amino-3-(2-fluorophenyl)-2-methylpropanoic acid
  SITE 10: note = 3-(4-pyridyl)-L-alanine
  SITE 11: note = Alpha-methyl-L-serine
  SITE 13: note = Alpha-methyl-L-leucine
  SITE 16: note = Ornithine
  SITE 17: note = Lysine is chemically modified through conjugation of the side chain with 2-[2-(2-amino-ethoxy)-ethoxy]-acetyl-Gamma-Glutamic acid-CO-(CH2)16-CO2H
  SITE 20: note = Alpha-methyl-L-3-(4-pyridyl)-L-alanine
  SITE 21: note = Ornithine
  SITE 25: note = Alpha-methyl-L-tyrosine
  SITE 40: note = Lysine amide is chemically modified through conjugation of the side chain with 24x Polyethylene glycol-(6S,16S)-6,16-bis(aminomethyl)-4,7,15,18-tetraoxo-11 -(4-oxobutanoyl)-5,8,11,14,17-pentaazahenicosanedioic acid (BEA-MalDap2) which is attached to two Fc sequences

SEQ ID NO: 1127 - protein, 40 aa, synthetic construct; identical to SEQ ID NO: 792
  SITE 2: note = Alpha-methyl-L-serine
  SITE 6: note = (S)-2-amino-3-(2-fluorophenyl)-2-methylpropanoic acid
  SITE 11: note = Alpha-methyl-L-serine
  SITE 13: note = Alpha-methyl-L-leucine
  SITE 16: note = Ornithine
  SITE 17: note = Lysine is chemically modified through conjugation of the side chain with (2-[2-(2-amino-ethoxy)-ethoxy]-acetyl)2-Gamma-Glutamic acid-CO-(CH2)16-CO2H
  SITE 20: note = Alpha-methyl-L-3-(4-pyridyl)-L-alanine
  SITE 21: note = Ornithine
  SITE 25: note = Alpha-methyl-L-tyrosine
  SITE 40: note = Lysine amide is chemically modified through conjugation of the side chain with 24x Polyethylene glycol-(6S,16S)-6,16-bis(aminomethyl)-4,7,15,18-tetraoxo-11 -(4-oxobutanoyl)-5,8,11,14,17-pentaazahenicosanedioic acid (BEA-MalDap2) which is attached to two Fc sequences

SEQ ID NO: 1128 - protein, 40 aa, synthetic construct; identical to SEQ ID NO: 792
  SITE 2: note = L-isovaline
  SITE 6: note = (S)-2-amino-3-(2-fluorophenyl)-2-methylpropanoic acid
  SITE 11: note = Alpha-methyl-L-serine
  SITE 13: note = Alpha-methyl-L-leucine
  SITE 16: note = Ornithine
  SITE 17: note = Lysine is chemically modified through conjugation of the side chain with 2-[2-(2-amino-ethoxy)-ethoxy]-acetyl-Gamma-Glutamic acid-CO-(CH2)16-CO2H
  SITE 20: note = Alpha-methyl-L-3-(4-pyridyl)-L-alanine
  SITE 21: note = Ornithine
  SITE 25: note = Alpha-methyl-L-tyrosine
  SITE 40: note = Lysine amide is chemically modified through conjugation of the side chain with 24x Polyethylene glycol-(6S,16S)-6,16-bis(aminomethyl)-4,7,15,18-tetraoxo-11 -(4-oxobutanoyl)-5,8,11,14,17-pentaazahenicosanedioic acid (BEA-MalDap2) which is attached to two Fc sequences

SEQ ID NO: 1129 - protein, 40 aa, synthetic construct; identical to SEQ ID NO: 790
  SITE 2: note = L-isovaline
  SITE 6: note = (S)-2-amino-3-(2-fluorophenyl)-2-methylpropanoic acid
  SITE 10: note = 3-(4-pyridyl)-L-alanine
  SITE 11: note = Alpha-methyl-L-serine
  SITE 13: note = Alpha-methyl-L-leucine
  SITE 16: note = Ornithine
  SITE 17: note = Lysine is chemically modified through conjugation of the side chain with 2-[2-(2-amino-ethoxy)-ethoxy]-acetyl-Gamma-Glutamic acid-CO-(CH2)16-CO2H
  SITE 20: note = Alpha-methyl-L-3-(4-pyridyl)-L-alanine
  SITE 21: note = Ornithine
  SITE 25: note = Alpha-methyl-L-tyrosine
  SITE 40: note = Lysine amide is chemically modified through conjugation of the side chain with 24x Polyethylene glycol-(6S,16S)-6,16-bis(aminomethyl)-4,7,15,18-tetraoxo-11 -(4-oxobutanoyl)-5,8,11,14,17-pentaazahenicosanedioic acid (BEA-MalDap2) which is attached to two Fc sequences

SEQ ID NO: 1130 - protein, 40 aa, synthetic construct; identical to SEQ ID NO: 792
  SITE 2: note = L-isovaline
  SITE 6: note = (S)-2-amino-3-(2-fluorophenyl)-2-methylpropanoic acid
  SITE 11: note = Alpha-methyl-L-serine
  SITE 13: note = Alpha-methyl-L-leucine
  SITE 16: note = Ornithine
  SITE 17: note = Lysine is chemically modified through conjugation of the side chain with (2-[2-(2-amino-ethoxy)-ethoxy]-acetyl)2-Gamma-Glutamic acid-CO-(CH2)16-CO2H
  SITE 20: note = Alpha-methyl-L-3-(4-pyridyl)-L-alanine
  SITE 21: note = Ornithine
  SITE 25: note = Alpha-methyl-L-tyrosine
  SITE 40: note = Lysine amide is chemically modified through conjugation of the side chain with 24x Polyethylene glycol-(6S,16S)-6,16-bis(aminomethyl)-4,7,15,18-tetraoxo-11 -(4-oxobutanoyl)-5,8,11,14,17-pentaazahenicosanedioic acid (BEA-MalDap2) which is attached to two Fc sequences

SEQ ID NO: 1131 - protein, 40 aa, synthetic construct; identical to SEQ ID NO: 845
  SITE 2: note = 1-Aminocyclobutane-1-carboxylic acid
  SITE 6: note = (S)-2-amino-3-(2-fluorophenyl)-2-methylpropanoic acid
  SITE 10: note = 3-(4-pyridyl)-L-alanine
  SITE 11: note = Alpha-methyl-L-serine
  SITE 13: note = Alpha-methyl-L-leucine
  SITE 16: note = Ornithine
  SITE 17: note = Lysine is chemically modified through conjugation of the side chain with 2-[2-(2-amino-ethoxy)-ethoxy]-acetyl-Gamma-Glutamic acid-CO-(CH2)16-CO2H
  SITE 20: note = Alpha-methyl-L-3-(4-pyridyl)-L-alanine
  SITE 25: note = Alpha-methyl-L-tyrosine
  SITE 40: note = Lysine amide is chemically modified through conjugation of the side chain with 24x Polyethylene glycol-(6S,16S)-6,16-bis(aminomethyl)-4,7,15,18-tetraoxo-11 -(4-oxobutanoyl)-5,8,11,14,17-pentaazahenicosanedioic acid (BEA-MalDap2) which is attached to two Fc sequences

SEQ ID NO: 1132 - protein, 40 aa, synthetic construct; identical to SEQ ID NO: 827
  SITE 2: note = 1-Aminocyclobutane-1-carboxylic acid
  SITE 6: note = (S)-2-amino-3-(2-fluorophenyl)-2-methylpropanoic acid
  SITE 11: note = Alpha-methyl-L-serine
  SITE 13: note = Alpha-methyl-L-leucine
  SITE 16: note = Ornithine
  SITE 17: note = Lysine is chemically modified through conjugation of the side chain with (2-[2-(2-amino-ethoxy)-ethoxy]-acetyl)2-Gamma-Glutamic acid-CO-(CH2)16-CO2H
  SITE 20: note = Alpha-methyl-L-3-(4-pyridyl)-L-alanine
  SITE 25: note = Alpha-methyl-L-tyrosine
  SITE 40: note = Lysine amide is chemically modified through conjugation of the side chain with 24x Polyethylene glycol-(6S,16S)-6,16-bis(aminomethyl)-4,7,15,18-tetraoxo-11 -(4-oxobutanoyl)-5,8,11,14,17-pentaazahenicosanedioic acid (BEA-MalDap2) which is attached to two Fc sequences

SEQ ID NO: 1133 - protein, 41 aa, synthetic construct; identical to SEQ ID NO: 1116
  SITE 2: note = 2-aminoisobutyric acid
  SITE 6: note = (S)-2-amino-3-(2-fluorophenyl)-2-methylpropanoic acid
  SITE 11: note = Alpha-methyl-L-serine
  SITE 13: note = Alpha-methyl-L-leucine
  SITE 16: note = Ornithine
  SITE 17: note = Lysine is chemically modified through conjugation of the side chain with 2-[2-(2-amino-ethoxy)-ethoxy]-acetyl-Gamma-Glutamic acid-CO-(CH2)16-CO2H
  SITE 20: note = Alpha-methyl-L-3-(4-pyridyl)-L-alanine
  SITE 25: note = Alpha-methyl-L-tyrosine
  SITE 41: note = Lysine amide is chemically modified through conjugation of the side chain with 24x Polyethylene glycol-(6S,16S)-6,16-bis(aminomethyl)-4,7,15,18-tetraoxo-11 -(4-oxobutanoyl)-5,8,11,14,17-pentaazahenicosanedioic acid (BEA-MalDap2) which is attached to two Fc sequences

SEQ ID NO: 1134 - protein, 40 aa, synthetic construct; identical to SEQ ID NO: 827
  SITE 2: note = 2-aminoisobutyric acid
  SITE 6: note = (S)-2-amino-3-(2-fluorophenyl)-2-methylpropanoic acid
  SITE 11: note = Alpha-methyl-L-serine
  SITE 13: note = Alpha-methyl-L-leucine
  SITE 16: note = Ornithine
  SITE 17: note = Lysine is chemically modified through conjugation of the side chain with epsilon-Lysine-epsilon-Lysine-Gamma-Glutamic acid-CO-(CH2)16-CO2H
  SITE 20: note = Alpha-methyl-L-3-(4-pyridyl)-L-alanine
  SITE 24: note = D-Glutamic acid
  SITE 25: note = Alpha-methyl-L-tyrosine
  SITE 40: note = Lysine amide is chemically modified through conjugation of the side chain with 24x Polyethylene glycol-(6S,16S)-6,16-bis(aminomethyl)-4,7,15,18-tetraoxo-11 -(4-oxobutanoyl)-5,8,11,14,17-pentaazahenicosanedioic acid (BEA-MalDap2) which is attached to two Fc sequences

SEQ ID NO: 1135 - protein, 40 aa, synthetic construct; identical to SEQ ID NO: 792
  SITE 2: note = 2-aminoisobutyric acid
  SITE 6: note = (S)-2-amino-3-(2-fluorophenyl)-2-methylpropanoic acid
  SITE 11: note = Alpha-methyl-L-serine
  SITE 13: note = Alpha-methyl-L-leucine
  SITE 16: note = Ornithine
  SITE 17: note = Lysine is chemically modified through conjugation of the side chain with 2-[2-(2-amino-ethoxy)-ethoxy]-acetyl-Gamma-Glutamic acid-CO-(CH2)16-CO2H
  SITE 20: note = Alpha-methyl-L-leucine
  SITE 21: note = Ornithine
  SITE 24: note = D-Glutamic acid
  SITE 25: note = Alpha-methyl-L-tyrosine
  SITE 40: note = Lysine amide is chemically modified through conjugation of the side chain with 24x Polyethylene glycol-(6S,16S)-6,16-bis(aminomethyl)-4,7,15,18-tetraoxo-11 -(4-oxobutanoyl)-5,8,11,14,17-pentaazahenicosanedioic acid (BEA-MalDap2) which is attached to two Fc sequences

SEQ ID NO: 1136 - protein, 40 aa, synthetic construct; identical to SEQ ID NO: 792
  SITE 2: note = 2-aminoisobutyric acid
  SITE 6: note = (S)-2-amino-3-(2-fluorophenyl)-2-methylpropanoic acid
  SITE 11: note = Alpha-methyl-L-serine
  SITE 13: note = Alpha-methyl-L-leucine
  SITE 16: note = Ornithine
  SITE 17: note = Lysine is chemically modified through conjugation of the side chain with 2-[2-(2-amino-ethoxy)-ethoxy]-acetyl-Gamma-Glutamic acid-CO-(CH2)16-CO2H
  SITE 20: note = Alpha-methyl-L-leucine
  SITE 21: note = L-isovaline
  SITE 24: note = D-Glutamic acid
  SITE 25: note = Alpha-methyl-L-tyrosine
  SITE 40: note = Lysine amide is chemically modified through conjugation of the side chain with 24x Polyethylene glycol-(6S,16S)-6,16-bis(aminomethyl)-4,7,15,18-tetraoxo-11 -(4-oxobutanoyl)-5,8,11,14,17-pentaazahenicosanedioic acid (BEA-MalDap2) which is attached to two Fc sequences

SEQ ID NO: 1137 - protein, 40 aa, synthetic construct; identical to SEQ ID NO: 790
  SITE 2: note = 2-aminoisobutyric acid
  SITE 6: note = (S)-2-amino-3-(2-fluorophenyl)-2-methylpropanoic acid
  SITE 10: note = 3-(4-pyridyl)-L-alanine
  SITE 11: note = Alpha-methyl-L-serine
  SITE 13: note = Alpha-methyl-L-leucine
  SITE 16: note = Ornithine
  SITE 17: note = Lysine is chemically modified through conjugation of the side chain with 2-[2-(2-amino-ethoxy)-ethoxy]-acetyl-Gamma-Glutamic acid-CO-(CH2)16-CO2H
  SITE 20: note = Alpha-methyl-L-leucine
  SITE 21: note = Ornithine
  SITE 24: note = D-Glutamic acid
  SITE 25: note = Alpha-methyl-L-tyrosine
  SITE 40: note = Lysine amide is chemically modified through conjugation of the side chain with 24x Polyethylene glycol-(6S,16S)-6,16-bis(aminomethyl)-4,7,15,18-tetraoxo-11 -(4-oxobutanoyl)-5,8,11,14,17-pentaazahenicosanedioic acid (BEA-MalDap2) which is attached to two Fc sequences

SEQ ID NO: 1138 - protein, 40 aa, synthetic construct; identical to SEQ ID NO: 790
  SITE 2: note = 2-aminoisobutyric acid
  SITE 6: note = (S)-2-amino-3-(2-fluorophenyl)-2-methylpropanoic acid
  SITE 10: note = 3-(4-pyridyl)-L-alanine
  SITE 11: note = Alpha-methyl-L-serine
  SITE 13: note = Alpha-methyl-L-leucine
  SITE 16: note = Ornithine
  SITE 17: note = Lysine is chemically modified through conjugation of the side chain with 2-[2-(2-amino-ethoxy)-ethoxy]-acetyl-Gamma-Glutamic acid-CO-(CH2)16-CO2H
  SITE 20: note = Alpha-methyl-L-leucine
  SITE 21: note = L-isovaline
  SITE 24: note = D-Glutamic acid
  SITE 25: note = Alpha-methyl-L-tyrosine
  SITE 40: note = Lysine amide is chemically modified through conjugation of the side chain with 24x Polyethylene glycol-(6S,16S)-6,16-bis(aminomethyl)-4,7,15,18-tetraoxo-11 -(4-oxobutanoyl)-5,8,11,14,17-pentaazahenicosanedioic acid (BEA-MalDap2) which is attached to two Fc sequences

SEQ ID NO: 1139 - protein, 40 aa, synthetic construct
  SITE 2: note = 2-aminoisobutyric acid
  SITE 6: note = (S)-2-amino-3-(2-fluorophenyl)-2-methylpropanoic acid
  SITE 11: note = Alpha-methyl-L-serine
  SITE 13: note = Alpha-methyl-L-leucine
  SITE 16: note = Ornithine
  SITE 17: note = Lysine is chemically modified through conjugation of the side chain with (2-[2-(2-amino-ethoxy)-ethoxy]-acetyl)2-Gamma-Glutamic acid-CO-(CH2)16-CO2H
  SITE 20: note = Alpha-methyl-L-3-(4-pyridyl)-L-alanine
  SITE 25: note = Alpha-methyl-L-tyrosine
  SITE 40: note = Lysine amide is chemically modified through conjugation of the side chain with 24x Polyethylene glycol-(6S,16S)-6,16-bis(aminomethyl)-4,7,15,18-tetraoxo-11 -(4-oxobutanoyl)-5,8,11,14,17-pentaazahenicosanedioic acid (BEA-MalDap2) which is attached to two Fc sequences
YXQGTXTSDYXIXLDXKAQXEFIEXLIAGSPSSGAPPPSK

SEQ ID NO: 1140 - protein, 40 aa, synthetic construct; identical to SEQ ID NO: 1139
  SITE 2: note = 2-aminoisobutyric acid
  SITE 6: note = (S)-2-amino-3-(2-fluorophenyl)-2-methylpropanoic acid
  SITE 11: note = Alpha-methyl-L-serine
  SITE 13: note = Alpha-methyl-L-leucine
  SITE 16: note = Ornithine
  SITE 17: note = Lysine is chemically modified through conjugation of the side chain with 2-[2-(2-amino-ethoxy)-ethoxy]-acetyl-Gamma-Glutamic acid-CO-(CH2)16-CO2H
  SITE 20: note = Alpha-methyl-L-3-(4-pyridyl)-L-alanine
  SITE 25: note = Alpha-methyl-L-tyrosine
  SITE 40: note = Lysine amide is chemically modified through conjugation of the side chain with 24x Polyethylene glycol-(6S,16S)-6,16-bis(aminomethyl)-4,7,15,18-tetraoxo-11 -(4-oxobutanoyl)-5,8,11,14,17-pentaazahenicosanedioic acid (BEA-MalDap2) which is attached to two Fc sequences

SEQ ID NO: 1141 - protein, 40 aa, synthetic construct
  SITE 2: note = 2-aminoisobutyric acid
  SITE 6: note = (S)-2-amino-3-(2-fluorophenyl)-2-methylpropanoic acid
  SITE 11: note = Alpha-methyl-L-serine
  SITE 13: note = Alpha-methyl-L-leucine
  SITE 16: note = Ornithine
  SITE 17: note = Lysine is chemically modified through conjugation of the side chain with (2-[2-(2-amino-ethoxy)-ethoxy]-acetyl)2-Gamma-Glutamic acid-CO-(CH2)16-CO2H
  SITE 20: note = Alpha-methyl-L-3-(4-pyridyl)-L-alanine
  SITE 25: note = Alpha-methyl-L-tyrosine
  SITE 29: note = D-Alanine
  SITE 40: note = Lysine amide is chemically modified through conjugation of the side chain with 24x Polyethylene glycol-(6S,16S)-6,16-bis(aminomethyl)-4,7,15,18-tetraoxo-11 -(4-oxobutanoyl)-5,8,11,14,17-pentaazahenicosanedioic acid (BEA-MalDap2) which is attached to two Fc sequences
YXQGTXTSDYXIXLDXKAQXEFIEXLIEASPSSGAPPPSK

SEQ ID NO: 1142 - protein, 40 aa, synthetic construct; identical to SEQ ID NO: 1139
  SITE 2: note = 2-aminoisobutyric acid
  SITE 6: note = (S)-2-amino-3-(2-fluorophenyl)-2-methylpropanoic acid
  SITE 11: note = Alpha-methyl-L-serine
  SITE 13: note = Alpha-methyl-L-leucine
  SITE 16: note = Ornithine
  SITE 17: note = Lysine is chemically modified through conjugation of the side chain with 2-[2-(2-amino-ethoxy)-ethoxy]-acetyl-Gamma-Glutamic acid-CO-(CH2)16-CO2H
  SITE 20: note = Alpha-methyl-L-3-(4-pyridyl)-L-alanine
  SITE 24: note = D-Glutamic acid
  SITE 25: note = Alpha-methyl-L-tyrosine
  SITE 40: note = Lysine amide is chemically modified through conjugation of the side chain with 24x Polyethylene glycol-(6S,16S)-6,16-bis(aminomethyl)-4,7,15,18-tetraoxo-11 -(4-oxobutanoyl)-5,8,11,14,17-pentaazahenicosanedioic acid (BEA-MalDap2) which is attached to two Fc sequences

SEQ ID NO: 1143 - protein, 40 aa, synthetic construct
  SITE 2: note = D-Alanine
  SITE 6: note = (S)-2-amino-3-(2-fluorophenyl)-2-methylpropanoic acid
  SITE 11: note = Alpha-methyl-L-serine
  SITE 13: note = Alpha-methyl-L-leucine
  SITE 16: note = Ornithine
  SITE 17: note = Lysine is chemically modified through conjugation of the side chain with (2-[2-(2-amino-ethoxy)-ethoxy]-acetyl)2-Gamma-Glutamic acid-CO-(CH2)16-CO2H
  SITE 20: note = Alpha-methyl-L-3-(4-pyridyl)-L-alanine
  SITE 21: note = Ornithine
  SITE 25: note = Alpha-methyl-L-tyrosine
  SITE 40: note = Lysine amide is chemically modified through conjugation of the side chain with 24x Polyethylene glycol-(6S,16S)-6,16-bis(aminomethyl)-4,7,15,18-tetraoxo-11 -(4-oxobutanoyl)-5,8,11,14,17-pentaazahenicosanedioic acid (BEA-MalDap2) which is attached to two Fc sequences
YAQGTXTSDYXIXLDXKAQXXFIEXLIAGSPSSGAPPPSK

SEQ ID NO: 1144 - protein, 40 aa, synthetic construct
  SITE 2: note = 2-aminoisobutyric acid
  SITE 6: note = (S)-2-amino-3-(2-fluorophenyl)-2-methylpropanoic acid
  SITE 11: note = Alpha-methyl-L-serine
  SITE 13: note = Alpha-methyl-L-leucine
  SITE 16: note = Ornithine
  SITE 17: note = Lysine is chemically modified through conjugation of the side chain with 2-[2-(2-amino-ethoxy)-ethoxy]-acetyl-Gamma-Glutamic acid-CO-(CH2)16-CO2H
  SITE 20: note = 2-aminoisobutyric acid
  SITE 21: note = Ornithine
  SITE 24: note = D-Glutamic acid
  SITE 25: note = Alpha-methyl-L-tyrosine
  SITE 40: note = Lysine amide is chemically modified through conjugation of the side chain with 24x Polyethylene glycol-(6S,16S)-6,16-bis(aminomethyl)-4,7,15,18-tetraoxo-11 -(4-oxobutanoyl)-5,8,11,14,17-pentaazahenicosanedioic acid (BEA-MalDap2) which is attached to two Fc sequences
YXQGTXTSDYXIXLDXKAQXXFIEXLIAGSPSSGAPPPSK

SEQ ID NO: 1145 - protein, 40 aa, synthetic construct
  SITE 2: note = D-Alanine
  SITE 6: note = (S)-2-amino-3-(2-fluorophenyl)-2-methylpropanoic acid
  SITE 11: note = Alpha-methyl-L-serine
  SITE 13: note = Alpha-methyl-L-leucine
  SITE 16: note = Ornithine
  SITE 17: note = Lysine is chemically modified through conjugation of the side chain with (2-[2-(2-amino-ethoxy)-ethoxy]-acetyl)2-Gamma-Glutamic acid-CO-(CH2)16-CO2H
  SITE 20: note = Alpha-methyl-L-3-(4-pyridyl)-L-alanine
  SITE 21: note = Ornithine
  SITE 25: note = Alpha-methyl-L-tyrosine
  SITE 29: note = D-Alanine
  SITE 40: note = Lysine amide is chemically modified through conjugation of the side chain with 24x Polyethylene glycol-(6S,16S)-6,16-bis(aminomethyl)-4,7,15,18-tetraoxo-11 -(4-oxobutanoyl)-5,8,11,14,17-pentaazahenicosanedioic acid (BEA-MalDap2) which is attached to two Fc sequences
YAQGTXTSDYXIXLDXKAQXXFIEXLIEASPSSGAPPPSK

SEQ ID NO: 1146 - protein, 40 aa, synthetic construct
  SITE 2: note = 2-aminoisobutyric acid
  SITE 6: note = (S)-2-amino-3-(2-fluorophenyl)-2-methylpropanoic acid
  SITE 11: note = Alpha-methyl-L-serine
  SITE 13: note = Alpha-methyl-L-leucine
  SITE 16: note = Ornithine
  SITE 17: note = Lysine is chemically modified through conjugation of the side chain with (2-[2-(2-amino-ethoxy)-ethoxy]-acetyl)2-Gamma-Glutamic acid-CO-(CH2)16-CO2H
  SITE 20: note = Alpha-methyl-L-3-(4-pyridyl)-L-alanine
  SITE 25: note = Alpha-methyl-L-tyrosine
  SITE 40: note = Lysine amide is chemically modified through conjugation of the side chain with 24x Polyethylene glycol-(6S,16S)-6,16-bis(aminomethyl)-4,7,15,18-tetraoxo-11 -(4-oxobutanoyl)-5,8,11,14,17-pentaazahenicosanedioic acid (BEA-MalDap2) which is attached to two Fc sequences
YXQGTXTSDYXIXLDXKAQXSFIEXLIEGSPSSGAPPPSK

SEQ ID NO: 1147 - protein, 40 aa, synthetic construct; identical to SEQ ID NO: 1146
  SITE 2: note = 2-aminoisobutyric acid
  SITE 6: note = (S)-2-amino-3-(2-fluorophenyl)-2-methylpropanoic acid
  SITE 11: note = Alpha-methyl-L-serine
  SITE 13: note = Alpha-methyl-L-leucine
  SITE 16: note = Ornithine
  SITE 17: note = Lysine is chemically modified through conjugation of the side chain with (2-[2-(2-amino-ethoxy)-ethoxy]-acetyl)2-Gamma-Glutamic acid-CO-(CH2)16-CO2H
  SITE 20: note = 2-aminoisobutyric acid
  SITE 25: note = Alpha-methyl-L-tyrosine
  SITE 40: note = Lysine amide is chemically modified through conjugation of the side chain with 24x Polyethylene glycol-(6S,16S)-6,16-bis(aminomethyl)-4,7,15,18-tetraoxo-11 -(4-oxobutanoyl)-5,8,11,14,17-pentaazahenicosanedioic acid (BEA-MalDap2) which is attached to two Fc sequences

SEQ ID NO: 1148 - protein, 40 aa, synthetic construct
  SITE 2: note = 2-aminoisobutyric acid
  SITE 6: note = (S)-2-amino-3-(2-fluorophenyl)-2-methylpropanoic acid
  SITE 11: note = Alpha-methyl-L-serine
  SITE 13: note = Alpha-methyl-L-leucine
  SITE 16: note = Ornithine
  SITE 17: note = Lysine is chemically modified through conjugation of the side chain with (2-[2-(2-amino-ethoxy)-ethoxy]-acetyl)2-Gamma-Glutamic acid-CO-(CH2)16-CO2H
  SITE 20: note = 3-(4-pyridyl)-L-alanine
  SITE 25: note = Alpha-methyl-L-tyrosine
  SITE 40: note = Lysine amide is chemically modified through conjugation of the side chain with 24x Polyethylene glycol-(6S,16S)-6,16-bis(aminomethyl)-4,7,15,18-tetraoxo-11 -(4-oxobutanoyl)-5,8,11,14,17-pentaazahenicosanedioic acid (BEA-MalDap2) which is attached to two Fc sequences
YXQGTXTSDYXIXLDXKAQXAFIEXLIEGSPSSGAPPPSK

SEQ ID NO: 1149 - protein, 40 aa, synthetic construct; identical to SEQ ID NO: 792
  SITE 2: note = 2-aminoisobutyric acid
  SITE 6: note = (S)-2-amino-3-(2-fluorophenyl)-2-methylpropanoic acid
  SITE 11: note = Alpha-methyl-L-serine
  SITE 13: note = Alpha-methyl-L-leucine
  SITE 16: note = Ornithine
  SITE 17: note = Lysine is chemically modified through conjugation of the side chain with 2-[2-(2-amino-ethoxy)-ethoxy]-acetyl-Gamma-Glutamic acid-CO-(CH2)16-CO2H
  SITE 20: note = Alpha-methyl-L-phenylalanine
  SITE 21: note = 2-aminoisobutyric acid
  SITE 24: note = D-Glutamic acid
  SITE 25: note = Alpha-methyl-L-tyrosine
  SITE 40: note = Lysine amide is chemically modified through conjugation of the side chain with 24x Polyethylene glycol-(6S,16S)-6,16-bis(aminomethyl)-4,7,15,18-tetraoxo-11 -(4-oxobutanoyl)-5,8,11,14,17-pentaazahenicosanedioic acid (BEA-MalDap2) which is attached to two Fc sequences

SEQ ID NO: 1150 - protein, 40 aa, synthetic construct; identical to SEQ ID NO: 1148
  SITE 2: note = 2-aminoisobutyric acid
  SITE 6: note = (S)-2-amino-3-(2-fluorophenyl)-2-methylpropanoic acid
  SITE 11: note = Alpha-methyl-L-serine
  SITE 13: note = Alpha-methyl-L-leucine
  SITE 16: note = Ornithine
  SITE 17: note = Lysine is chemically modified through conjugation of the side chain with 2-[2-(2-amino-ethoxy)-ethoxy]-acetyl-Gamma-Glutamic acid-CO-(CH2)16-CO2H
  SITE 20: note = L-isovaline
  SITE 24: note = D-Glutamic acid
  SITE 25: note = Alpha-methyl-L-tyrosine
  SITE 40: note = Lysine amide is chemically modified through conjugation of the side chain with 24x Polyethylene glycol-(6S,16S)-6,16-bis(aminomethyl)-4,7,15,18-tetraoxo-11 -(4-oxobutanoyl)-5,8,11,14,17-pentaazahenicosanedioic acid (BEA-MalDap2) which is attached to two Fc sequences

SEQ ID NO: 1151 - protein, 40 aa, synthetic construct; identical to SEQ ID NO: 827
  SITE 2: note = 2-aminoisobutyric acid
  SITE 6: note = (S)-2-amino-3-(2-fluorophenyl)-2-methylpropanoic acid
  SITE 11: note = Alpha-methyl-L-serine
  SITE 13: note = Alpha-methyl-L-leucine
  SITE 16: note = Ornithine
  SITE 17: note = Lysine is chemically modified through conjugation of the side chain with (2-[2-(2-amino-ethoxy)-ethoxy]-acetyl)2-Gamma-Glutamic acid-CO-(CH2)16-CO2H
  SITE 20: note = 2-aminoisobutyric acid
  SITE 25: note = Alpha-methyl-L-tyrosine
  SITE 40: note = Lysine amide is chemically modified through conjugation of the side chain with 24x Polyethylene glycol-(6S,16S)-6,16-bis(aminomethyl)-4,7,15,18-tetraoxo-11 -(4-oxobutanoyl)-5,8,11,14,17-pentaazahenicosanedioic acid (BEA-MalDap2) which is attached to two Fc sequences

SEQ ID NO: 1152 - protein, 40 aa, synthetic construct; identical to SEQ ID NO: 847
  SITE 2: note = 2-aminoisobutyric acid
  SITE 6: note = (S)-2-amino-3-(2-fluorophenyl)-2-methylpropanoic acid
  SITE 11: note = Alpha-methyl-L-serine
  SITE 13: note = Alpha-methyl-L-leucine
  SITE 16: note = Ornithine
  SITE 17: note = Lysine is chemically modified through conjugation of the side chain with 2-[2-(2-amino-ethoxy)-ethoxy]-acetyl-Gamma-Glutamic acid-CO-(CH2)16-CO2H
  SITE 20: note = Alpha-methyl-L-3-(4-pyridyl)-L-alanine
  SITE 24: note = D-Glutamic acid
  SITE 25: note = Alpha-methyl-L-tyrosine
  SITE 29: note = 2-aminoisobutyric acid
  SITE 40: note = Lysine amide is chemically modified through conjugation of the side chain with 24x Polyethylene glycol-(6S,16S)-6,16-bis(aminomethyl)-4,7,15,18-tetraoxo-11 -(4-oxobutanoyl)-5,8,11,14,17-pentaazahenicosanedioic acid (BEA-MalDap2) which is attached to two Fc sequences

SEQ ID NO: 1153 - protein, 40 aa, synthetic construct
  SITE 2: note = 2-aminoisobutyric acid
  SITE 6: note = (S)-2-amino-3-(2-fluorophenyl)-2-methylpropanoic acid
  SITE 11: note = Alpha-methyl-L-serine
  SITE 13: note = Alpha-methyl-L-leucine
  SITE 16: note = Ornithine
  SITE 17: note = Lysine is chemically modified through conjugation of the side chain with 2-[2-(2-amino-ethoxy)-ethoxy]-acetyl-Gamma-Glutamic acid-CO-(CH2)16-CO2H
  SITE 20: note = Alpha-methyl-L-leucine
  SITE 21: note = Ornithine
  SITE 24: note = D-Glutamic acid
  SITE 25: note = Alpha-methyl-L-tyrosine
  SITE 29: note = D-Alanine
  SITE 40: note = Lysine amide is chemically modified through conjugation of the side chain with 24x Polyethylene glycol-(6S,16S)-6,16-bis(aminomethyl)-4,7,15,18-tetraoxo-11 -(4-oxobutanoyl)-5,8,11,14,17-pentaazahenicosanedioic acid (BEA-MalDap2) which is attached to two Fc sequences
YXQGTXTSDYXIXLDXKAQXXFIEXLIAASPSSGAPPPSK

SEQ ID NO: 1154 - protein, 40 aa, synthetic construct; identical to SEQ ID NO: 827
  SITE 2: note = 2-aminoisobutyric acid
  SITE 6: note = (S)-2-amino-3-(2-fluorophenyl)-2-methylpropanoic acid
  SITE 11: note = Alpha-methyl-L-serine
  SITE 13: note = Alpha-methyl-L-leucine
  SITE 16: note = Ornithine
  SITE 17: note = Lysine is chemically modified through conjugation of the side chain with 2-[2-(2-amino-ethoxy)-ethoxy]-acetyl-Gamma-Glutamic acid-CO-(CH2)16-CO2H
  SITE 20: note = Alpha-methyl-L-3-(4-pyridyl)-L-alanine
  SITE 25: note = Alpha-methyl-L-tyrosine
  SITE 40: note = Lysine amide is chemically modified through conjugation of the side chain with 24x Polyethylene glycol-N,N-bis(2-(2-(2-(2-(4-(1H-tetrazol-1-yl)phenoxy)etho xy)ethoxy)acetamido)ethyl)-4-oxobutanamide (BEA-MSPT2) which is attached to two Fc sequences

SEQ ID NO: 1155 - protein, 40 aa, synthetic construct; identical to SEQ ID NO: 849
  SITE 2: note = 2-aminoisobutyric acid
  SITE 6: note = (S)-2-amino-3-(2-fluorophenyl)-2-methylpropanoic acid
  SITE 10: note = 3-(4-pyridyl)-L-alanine
  SITE 11: note = Alpha-methyl-L-serine
  SITE 13: note = Alpha-methyl-L-leucine
  SITE 16: note = Ornithine
  SITE 17: note = Lysine is chemically modified through conjugation of the side chain with 2-[2-(2-amino-ethoxy)-ethoxy]-acetyl-Gamma-Glutamic acid-CO-(CH2)16-CO2H
  SITE 20: note = Alpha-methyl-L-3-(4-pyridyl)-L-alanine
  SITE 25: note = Alpha-methyl-L-tyrosine
  SITE 29: note = 2-aminoisobutyric acid
  SITE 40: note = Lysine amide is chemically modified through conjugation of the side chain with 24x Polyethylene glycol-N,N-bis(2-(2-(2-(2-(4-(1H-tetrazol-1-yl)phenoxy)etho xy)ethoxy)acetamido)ethyl)-4-oxobutanamide (BEA-MSPT2) which is attached to two Fc sequences

SEQ ID NO: 1156 - protein, 40 aa, synthetic construct
  SITE 2: note = 2-aminoisobutyric acid
  SITE 6: note = (S)-2-amino-3-(2-fluorophenyl)-2-methylpropanoic acid
  SITE 10: note = 3-(4-pyridyl)-L-alanine
  SITE 11: note = Alpha-methyl-L-serine
  SITE 13: note = Alpha-methyl-L-leucine
  SITE 16: note = Ornithine
  SITE 17: note = Lysine is chemically modified through conjugation of the side chain with 2-[2-(2-amino-ethoxy)-ethoxy]-acetyl-Gamma-Glutamic acid-CO-(CH2)16-CO2H
  SITE 20: note = Alpha-methyl-L-3-(4-pyridyl)-L-alanine
  SITE 25: note = Alpha-methyl-L-tyrosine
  SITE 40: note = Lysine amide is chemically modified through conjugation of the side chain with 24x Polyethylene glycol-N,N-bis(2-(2-(2-(2-(4-(1H-tetrazol-1-yl)phenoxy)etho xy)ethoxy)acetamido)ethyl)-4-oxobutanamide (BEA-MSPT2) which is attached to two Fc sequences
YXQGTXTSDXXIXLDXKAQXEFIEXLIAGSPSSGAPPPSK

SEQ ID NO: 1157 - protein, 40 aa, synthetic construct
  SITE 2: note = 2-aminoisobutyric acid
  SITE 6: note = (S)-2-amino-3-(2-fluorophenyl)-2-methylpropanoic acid
  SITE 10: note = 3-(4-pyridyl)-L-alanine
  SITE 11: note = Alpha-methyl-L-serine
  SITE 13: note = Alpha-methyl-L-leucine
  SITE 16: note = Ornithine
  SITE 17: note = Lysine is chemically modified through conjugation of the side chain with 2-[2-(2-amino-ethoxy)-ethoxy]-acetyl-Gamma-Glutamic acid-CO-(CH2)16-CO2H
  SITE 20: note = Alpha-methyl-L-3-(4-pyridyl)-L-alanine
  SITE 25: note = Alpha-methyl-L-tyrosine
  SITE 29: note = D-Alanine
  SITE 40: note = Lysine amide is chemically modified through conjugation of the side chain with 24x Polyethylene glycol-N,N-bis(2-(2-(2-(2-(4-(1H-tetrazol-1-yl)phenoxy)etho xy)ethoxy)acetamido)ethyl)-4-oxobutanamide (BEA-MSPT2) which is attached to two Fc sequences
YXQGTXTSDXXIXLDXKAQXEFIEXLIAASPSSGAPPPSK

SEQ ID NO: 1158 - protein, 40 aa, synthetic construct
  SITE 2: note = 2-aminoisobutyric acid
  SITE 6: note = (S)-2-amino-3-(2-fluorophenyl)-2-methylpropanoic acid
  SITE 10: note = 3-(4-pyridyl)-L-alanine
  SITE 11: note = Alpha-methyl-L-serine
  SITE 13: note = Alpha-methyl-L-leucine
  SITE 16: note = Ornithine
  SITE 17: note = Lysine is chemically modified through conjugation of the side chain with 2-[2-(2-amino-ethoxy)-ethoxy]-acetyl-Gamma-Glutamic acid-CO-(CH2)16-CO2H
  SITE 20: note = Alpha-methyl-L-leucine
  SITE 21: note = L-isovaline
  SITE 24: note = D-Glutamic acid
  SITE 25: note = Alpha-methyl-L-tyrosine
  SITE 29: note = 2-aminoisobutyric acid
  SITE 40: note = Lysine amide is chemically modified through conjugation of the side chain with 24x Polyethylene glycol-N,N-bis(2-(2-(2-(2-(4-(1H-tetrazol-1-yl)phenoxy)etho xy)ethoxy)acetamido)ethyl)-4-oxobutanamide (BEA-MSPT2) which is attached to two Fc sequences
YXQGTXTSDXXIXLDXKAQXXFIEXLIAXSPSSGAPPPSK

SEQ ID NO: 1159 - protein, 40 aa, synthetic construct
  SITE 2: note = 2-aminoisobutyric acid
  SITE 6: note = (S)-2-amino-3-(2-fluorophenyl)-2-methylpropanoic acid
  SITE 10: note = 3-(4-pyridyl)-L-alanine
  SITE 11: note = Alpha-methyl-L-serine
  SITE 13: note = Alpha-methyl-L-leucine
  SITE 16: note = Ornithine
  SITE 17: note = Lysine is chemically modified through conjugation of the side chain with (2-[2-(2-amino-ethoxy)-ethoxy]-acetyl)2-Gamma-Glutamic acid-CO-(CH2)16-CO2H
  SITE 20: note = Alpha-methyl-L-3-(4-pyridyl)-L-alanine
  SITE 25: note = Alpha-methyl-L-tyrosine
  SITE 40: note = Lysine amide is chemically modified through conjugation of the side chain with 24x Polyethylene glycol-N,N-bis(2-(2-(2-(2-(4-(1H-tetrazol-1-yl)phenoxy)etho xy)ethoxy)acetamido)ethyl)-4-oxobutanamide (BEA-MSPT2) which is attached to two Fc sequences
YXQGTXTSDXXIXLDXKAQXSFIEXLIEGSPSSGAPPPSK

SEQ ID NO: 1160 - protein, 40 aa, synthetic construct
  SITE 2: note = 2-aminoisobutyric acid
  SITE 6: note = (S)-2-amino-3-(2-fluorophenyl)-2-methylpropanoic acid
  SITE 10: note = 3-(4-pyridyl)-L-alanine
  SITE 11: note = Alpha-methyl-L-serine
  SITE 13: note = Alpha-methyl-L-leucine
  SITE 16: note = Ornithine
  SITE 17: note = Lysine is chemically modified through conjugation of the side chain with (2-[2-(2-amino-ethoxy)-ethoxy]-acetyl)2-Gamma-Glutamic acid-CO-(CH2)16-CO2H
  SITE 20: note = Alpha-methyl-L-3-(4-pyridyl)-L-alanine
  SITE 25: note = Alpha-methyl-L-tyrosine
  SITE 29: note = 2-aminoisobutyric acid
  SITE 40: note = Lysine amide is chemically modified through conjugation of the side chain with 24x Polyethylene glycol-N,N-bis(2-(2-(2-(2-(4-(1H-tetrazol-1-yl)phenoxy)etho xy)ethoxy)acetamido)ethyl)-4-oxobutanamide (BEA-MSPT2) which is attached to two Fc sequences
YXQGTXTSDXXIXLDXKAQXSFIEXLIEXSPSSGAPPPSK

SEQ ID NO: 1161 - protein, 32 aa, synthetic construct
  SITE 2: note = 2-aminoisobutyric acid
  SITE 6: note = (S)-2-amino-3-(2-fluorophenyl)-2-methylpropanoic acid
  SITE 11: note = Alpha-methyl-L-serine
  SITE 13: note = Alpha-methyl-L-leucine
  SITE 16: note = Ornithine
  SITE 17: note = Lysine is chemically modified through conjugation of the side chain with (2-[2-(2-amino-ethoxy)-ethoxy]-acetyl)2-Gamma-Glutamic acid-CO-(CH2)16-CO2H
  SITE 20: note = Alpha-methyl-L-3-(4-pyridyl)-L-alanine
  SITE 25: note = Alpha-methyl-L-tyrosine
  SITE 32: note = Lysine amide is chemically modified through conjugation of the side chain with 24x Polyethylene glycol-N,N-bis(2-(2-(2-(2-(4-(1H-tetrazol-1-yl)phenoxy)etho xy)ethoxy)acetamido)ethyl)-4-oxobutanamide (BEA-MSPT2) which is attached to two Fc sequences
YXQGTXTSDYXIXLDXKAQXEFIEXLIEGGGK

SEQ ID NO: 1162 - protein, 32 aa, synthetic construct
  SITE 2: note = 2-aminoisobutyric acid
  SITE 6: note = (S)-2-amino-3-(2-fluorophenyl)-2-methylpropanoic acid
  SITE 11: note = Alpha-methyl-L-serine
  SITE 13: note = Alpha-methyl-L-leucine
  SITE 16: note = Ornithine
  SITE 17: note = Lysine is chemically modified through conjugation of the side chain with (2-[2-(2-amino-ethoxy)-ethoxy]-acetyl)2-Gamma-Glutamic acid-CO-(CH2)16-CO2H
  SITE 20: note = Alpha-methyl-L-3-(4-pyridyl)-L-alanine
  SITE 25: note = Alpha-methyl-L-tyrosine
  SITE 32: note = Lysine amide is chemically modified through conjugation of the side chain with 24x Polyethylene glycol-N,N-bis(2-(2-(2-(2-(4-(1H-tetrazol-1-yl)phenoxy)etho xy)ethoxy)acetamido)ethyl)-4-oxobutanamide (BEA-MSPT2) which is attached to two Fc sequences
YXQGTXTSDYXIXLDXKAQXEFIEXLIAGGGK

SEQ ID NO: 1163 - protein, 32 aa, synthetic construct; identical to SEQ ID NO: 1161
  SITE 2: note = 2-aminoisobutyric acid
  SITE 6: note = (S)-2-amino-3-(2-fluorophenyl)-2-methylpropanoic acid
  SITE 11: note = Alpha-methyl-L-serine
  SITE 13: note = Alpha-methyl-L-leucine
  SITE 16: note = Ornithine
  SITE 17: note = Lysine is chemically modified through conjugation of the side chain with 2-[2-(2-amino-ethoxy)-ethoxy]-acetyl-Gamma-Glutamic acid-CO-(CH2)16-CO2H
  SITE 20: note = Alpha-methyl-L-3-(4-pyridyl)-L-alanine
  SITE 25: note = Alpha-methyl-L-tyrosine
  SITE 32: note = Lysine amide is chemically modified through conjugation of the side chain with 24x Polyethylene glycol-N,N-bis(2-(2-(2-(2-(4-(1H-tetrazol-1-yl)phenoxy)etho xy)ethoxy)acetamido)ethyl)-4-oxobutanamide (BEA-MSPT2) which is attached to two Fc sequences

SEQ ID NO: 1164 - protein, 32 aa, synthetic construct; identical to SEQ ID NO: 1161
  SITE 2: note = 2-aminoisobutyric acid
  SITE 6: note = (S)-2-amino-3-(2-fluorophenyl)-2-methylpropanoic acid
  SITE 11: note = Alpha-methyl-L-serine
  SITE 13: note = Alpha-methyl-L-leucine
  SITE 16: note = Ornithine
  SITE 17: note = Lysine is chemically modified through conjugation of the side chain with 2-[2-(2-amino-ethoxy)-ethoxy]-acetyl-Gamma-Glutamic acid-CO-(CH2)16-CO2H
  SITE 20: note = Alpha-methyl-L-3-(4-pyridyl)-L-alanine
  SITE 24: note = D-Glutamic acid
  SITE 25: note = Alpha-methyl-L-tyrosine
  SITE 32: note = Lysine amide is chemically modified through conjugation of the side chain with 24x Polyethylene glycol-N,N-bis(2-(2-(2-(2-(4-(1H-tetrazol-1-yl)phenoxy)etho xy)ethoxy)acetamido)ethyl)-4-oxobutanamide (BEA-MSPT2) which is attached to two Fc sequences

SEQ ID NO: 1165 - protein, 32 aa, synthetic construct; identical to SEQ ID NO: 1161
  SITE 2: note = 1-Aminocyclobutane-1-carboxylic acid
  SITE 6: note = (S)-2-amino-3-(2-fluorophenyl)-2-methylpropanoic acid
  SITE 11: note = Alpha-methyl-L-serine
  SITE 13: note = Alpha-methyl-L-leucine
  SITE 16: note = Ornithine
  SITE 17: note = Lysine is chemically modified through conjugation of the side chain with 2-[2-(2-amino-ethoxy)-ethoxy]-acetyl-Gamma-Glutamic acid-CO-(CH2)16-CO2H
  SITE 20: note = Alpha-methyl-L-3-(4-pyridyl)-L-alanine
  SITE 25: note = Alpha-methyl-L-tyrosine
  SITE 32: note = Lysine amide is chemically modified through conjugation of the side chain with 24x Polyethylene glycol-N,N-bis(2-(2-(2-(2-(4-(1H-tetrazol-1-yl)phenoxy)etho xy)ethoxy)acetamido)ethyl)-4-oxobutanamide (BEA-MSPT2) which is attached to two Fc sequences

SEQ ID NO: 1166 - protein, 32 aa, synthetic construct
  SITE 2: note = 2-aminoisobutyric acid
  SITE 6: note = (S)-2-amino-3-(2-fluorophenyl)-2-methylpropanoic acid
  SITE 10: note = 3-(4-pyridyl)-L-alanine
  SITE 11: note = Alpha-methyl-L-serine
  SITE 13: note = Alpha-methyl-L-leucine
  SITE 16: note = Ornithine
  SITE 17: note = Lysine is chemically modified through conjugation of the side chain with 2-[2-(2-amino-ethoxy)-ethoxy]-acetyl-Gamma-Glutamic acid-CO-(CH2)16-CO2H
  SITE 20: note = Alpha-methyl-L-3-(4-pyridyl)-L-alanine
  SITE 25: note = Alpha-methyl-L-tyrosine
  SITE 32: note = Lysine amide is chemically modified through conjugation of the side chain with 24x Polyethylene glycol-N,N-bis(2-(2-(2-(2-(4-(1H-tetrazol-1-yl)phenoxy)etho xy)ethoxy)acetamido)ethyl)-4-oxobutanamide (BEA-MSPT2) which is attached to two Fc sequences
YXQGTXTSDXXIXLDXKAQXEFIEXLIEGGGK

SEQ ID NO: 1167 - protein, 40 aa, synthetic construct; identical to SEQ ID NO: 827
  SITE 2: note = 2-aminoisobutyric acid
  SITE 6: note = (S)-2-amino-3-(2-fluorophenyl)-2-methylpropanoic acid
  SITE 11: note = Alpha-methyl-L-serine
  SITE 13: note = Alpha-methyl-L-leucine
  SITE 16: note = Ornithine
  SITE 17: note = Lysine is chemically modified through conjugation of the side chain with (2-[2-(2-amino-ethoxy)-ethoxy]-acetyl)2-Gamma-Glutamic acid-CO-(CH2)14-CO2H
  SITE 20: note = Alpha-methyl-L-3-(4-pyridyl)-L-alanine
  SITE 25: note = Alpha-methyl-L-tyrosine
  SITE 40: note = Lysine amide is chemically modified through conjugation of the side chain with 24x Polyethylene glycol-(6S,16S)-6,16-bis(aminomethyl)-4,7,15,18-tetraoxo-11 -(4-oxobutanoyl)-5,8,11,14,17-pentaazahenicosanedioic acid (BEA-MalDap2) which is attached to two Fc sequences

SEQ ID NO: 1168 - protein, 40 aa, synthetic construct; identical to SEQ ID NO: 845
  SITE 2: note = 2-aminoisobutyric acid
  SITE 6: note = (S)-2-amino-3-(2-fluorophenyl)-2-methylpropanoic acid
  SITE 10: note = 3-(4-pyridyl)-L-alanine
  SITE 11: note = Alpha-methyl-L-serine
  SITE 13: note = Alpha-methyl-L-leucine
  SITE 16: note = Ornithine
  SITE 17: note = Lysine is chemically modified through conjugation of the side chain with 2-[2-(2-amino-ethoxy)-ethoxy]-acetyl-Gamma-Glutamic acid-CO-(CH2)14-CO2H
  SITE 20: note = Alpha-methyl-L-3-(4-pyridyl)-L-alanine
  SITE 25: note = Alpha-methyl-L-tyrosine
  SITE 40: note = Lysine amide is chemically modified through conjugation of the side chain with 24x Polyethylene glycol-(6S,16S)-6,16-bis(aminomethyl)-4,7,15,18-tetraoxo-11 -(4-oxobutanoyl)-5,8,11,14,17-pentaazahenicosanedioic acid (BEA-MalDap2) which is attached to two Fc sequences

SEQ ID NO: 1169 - protein, 40 aa, synthetic construct; identical to SEQ ID NO: 827
  SITE 2: note = 2-aminoisobutyric acid
  SITE 6: note = (S)-2-amino-3-(2-fluorophenyl)-2-methylpropanoic acid
  SITE 11: note = Alpha-methyl-L-serine
  SITE 13: note = Alpha-methyl-L-leucine
  SITE 16: note = Ornithine
  SITE 17: note = Lysine is chemically modified through conjugation of the side chain with 2-[2-(2-amino-ethoxy)-ethoxy]-acetyl-Gamma-Glutamic acid-CO-(CH2)14-CO2H
  SITE 20: note = Alpha-methyl-L-3-(4-pyridyl)-L-alanine
  SITE 25: note = Alpha-methyl-L-tyrosine
  SITE 40: note = Lysine amide is chemically modified through conjugation of the side chain with 24x Polyethylene glycol-(6S,16S)-6,16-bis(aminomethyl)-4,7,15,18-tetraoxo-11 -(4-oxobutanoyl)-5,8,11,14,17-pentaazahenicosanedioic acid (BEA-MalDap2) which is attached to two Fc sequences

SEQ ID NO: 1170 - protein, 40 aa, synthetic construct; identical to SEQ ID NO: 845
  SITE 2: note = 2-aminoisobutyric acid
  SITE 6: note = (S)-2-amino-3-(2-fluorophenyl)-2-methylpropanoic acid
  SITE 10: note = 3-(4-pyridyl)-L-alanine
  SITE 11: note = Alpha-methyl-L-serine
  SITE 13: note = Alpha-methyl-L-leucine
  SITE 16: note = Ornithine
  SITE 17: note = Lysine is chemically modified through conjugation of the side chain with 2-[2-(2-amino-ethoxy)-ethoxy]-acetyl-Gamma-Glutamic acid-CO-(CH2)14-CO2H
  SITE 20: note = Alpha-methyl-L-3-(4-pyridyl)-L-alanine
  SITE 24: note = D-Glutamic acid
  SITE 25: note = Alpha-methyl-L-tyrosine
  SITE 40: note = Lysine amide is chemically modified through conjugation of the side chain with 24x Polyethylene glycol-N,N-bis(2-(2-(2-(2-(4-(1H-tetrazol-1-yl)phenoxy)etho xy)ethoxy)acetamido)ethyl)-4-oxobutanamide (BEA-MSPT2) which is attached to two Fc sequences

SEQ ID NO: 1171 - protein, 40 aa, synthetic construct; identical to SEQ ID NO: 827
  SITE 2: note = 2-aminoisobutyric acid
  SITE 6: note = (S)-2-amino-3-(2-fluorophenyl)-2-methylpropanoic acid
  SITE 11: note = Alpha-methyl-L-serine
  SITE 13: note = Alpha-methyl-L-leucine
  SITE 16: note = Ornithine
  SITE 17: note = Lysine is chemically modified through conjugation of the side chain with (2-[2-(2-amino-ethoxy)-ethoxy]-acetyl)2-Gamma-Glutamic acid-CO-(CH2)16-CO2H
  SITE 20: note = Alpha-methyl-L-3-(4-pyridyl)-L-alanine
  SITE 25: note = Alpha-methyl-L-tyrosine
  SITE 40: note = Lysine amide is chemically modified through conjugation of the side chain with 24x Polyethylene glycol-N,N-bis(2-acetamidoethyl)-4-oxobutanamide (BEA-Acetyl2) which is attached to two Fc sequences

SEQ ID NO: 1172 - protein, 40 aa, synthetic construct; identical to SEQ ID NO: 827
  SITE 2: note = 2-aminoisobutyric acid
  SITE 6: note = (S)-2-amino-3-(2-fluorophenyl)-2-methylpropanoic acid
  SITE 11: note = Alpha-methyl-L-serine
  SITE 13: note = Alpha-methyl-L-leucine
  SITE 16: note = Ornithine
  SITE 17: note = Lysine is chemically modified through conjugation of the side chain with (2-[2-(2-amino-ethoxy)-ethoxy]-acetyl)2-Gamma-Glutamic acid-CO-(CH2)16-CO2H
  SITE 20: note = Alpha-methyl-L-3-(4-pyridyl)-L-alanine
  SITE 25: note = Alpha-methyl-L-tyrosine
  SITE 40: note = Lysine amide is chemically modified through conjugation of the side chain with 24x Polyethylene glycol-(7S,17S)-7,17-diamino-4,8,16,20-tetraoxo-12-(4-oxobu tanoyl)-5,9,12,15,19-pentaazatricosanedioic acid (BEA-Beta-MalDap2) which is attached to two Fc sequences

SEQ ID NO: 1173 - protein, 40 aa, synthetic construct; identical to SEQ ID NO: 845
  SITE 2: note = 2-aminoisobutyric acid
  SITE 6: note = (S)-2-amino-3-(2-fluorophenyl)-2-methylpropanoic acid
  SITE 10: note = 3-(4-pyridyl)-L-alanine
  SITE 11: note = Alpha-methyl-L-serine
  SITE 13: note = Alpha-methyl-L-leucine
  SITE 16: note = Ornithine
  SITE 17: note = Lysine is chemically modified through conjugation of the side chain with 2-[2-(2-amino-ethoxy)-ethoxy]-acetyl-Gamma-Glutamic acid-CO-(CH2)16-CO2H
  SITE 20: note = Alpha-methyl-L-3-(4-pyridyl)-L-alanine
  SITE 25: note = Alpha-methyl-L-tyrosine
  SITE 40: note = Lysine amide is chemically modified through conjugation of the side chain with 24x Polyethylene glycol-(7S,17S)-7,17-diamino-4,8,16,20-tetraoxo-12-(4-oxobu tanoyl)-5,9,12,15,19-pentaazatricosanedioic acid (BEA-Beta-MalDap2) which is attached to two Fc sequences

SEQ ID NO: 1174 - protein, 40 aa, synthetic construct; identical to SEQ ID NO: 827
  SITE 2: note = 2-aminoisobutyric acid
  SITE 6: note = (S)-2-amino-3-(2-fluorophenyl)-2-methylpropanoic acid
  SITE 11: note = Alpha-methyl-L-serine
  SITE 13: note = Alpha-methyl-L-leucine
  SITE 16: note = Ornithine
  SITE 17: note = Lysine is chemically modified through conjugation of the side chain with 2-[2-(2-amino-ethoxy)-ethoxy]-acetyl-Gamma-Glutamic acid-CO-(CH2)16-CO2H
  SITE 20: note = Alpha-methyl-L-3-(4-pyridyl)-L-alanine
  SITE 24: note = D-Glutamic acid
  SITE 25: note = Alpha-methyl-L-tyrosine
  SITE 40: note = Lysine amide is chemically modified through conjugation of the side chain with 24x Polyethylene glycol-(7S,17S)-7,17-diamino-4,8,16,20-tetraoxo-12-(4-oxobu tanoyl)-5,9,12,15,19-pentaazatricosanedioic acid (BEA-Beta-MalDap2) which is attached to two Fc sequences

SEQ ID NO: 1175 - protein, 40 aa, synthetic construct; identical to SEQ ID NO: 845
  SITE 2: note = 2-aminoisobutyric acid
  SITE 6: note = (S)-2-amino-3-(2-fluorophenyl)-2-methylpropanoic acid
  SITE 10: note = 3-(4-pyridyl)-L-alanine
  SITE 11: note = Alpha-methyl-L-serine
  SITE 13: note = Alpha-methyl-L-leucine
  SITE 16: note = Ornithine
  SITE 17: note = Lysine is chemically modified through conjugation of the side chain with 2-[2-(2-amino-ethoxy)-ethoxy]-acetyl-Gamma-Glutamic acid-CO-(CH2)16-CO2H
  SITE 20: note = Alpha-methyl-L-3-(4-pyridyl)-L-alanine
  SITE 24: note = D-Glutamic acid
  SITE 25: note = Alpha-methyl-L-tyrosine
  SITE 40: note = Lysine amide is chemically modified through conjugation of the side chain with 24x Polyethylene glycol-(7S,17S)-7,17-diamino-4,8,16,20-tetraoxo-12-(4-oxobu tanoyl)-5,9,12,15,19-pentaazatricosanedioic acid (BEA-Beta-MalDap2) which is attached to two Fc sequences

SEQ ID NO: 1176 - protein, 40 aa, synthetic construct; identical to SEQ ID NO: 1156
  SITE 2: note = 2-aminoisobutyric acid
  SITE 6: note = (S)-2-amino-3-(2-fluorophenyl)-2-methylpropanoic acid
  SITE 10: note = 3-(4-pyridyl)-L-alanine
  SITE 11: note = Alpha-methyl-L-serine
  SITE 13: note = Alpha-methyl-L-leucine
  SITE 16: note = Ornithine
  SITE 17: note = Lysine is chemically modified through conjugation of the side chain with 2-[2-(2-amino-ethoxy)-ethoxy]-acetyl-Gamma-Glutamic acid-CO-(CH2)16-CO2H
  SITE 20: note = Alpha-methyl-L-3-(4-pyridyl)-L-alanine
  SITE 25: note = Alpha-methyl-L-tyrosine
  SITE 40: note = Lysine amide is chemically modified through conjugation of the side chain with 24x Polyethylene glycol-(6S,16S)-6,16-bis(aminomethyl)-4,7,15,18-tetraoxo-11 -(4-oxobutanoyl)-5,8,11,14,17-pentaazahenicosanedioic acid (BEA-MalDap2) which is attached to two Fc sequences

SEQ ID NO: 1177 - protein, 40 aa, synthetic construct; identical to SEQ ID NO: 1156
  SITE 2: note = 2-aminoisobutyric acid
  SITE 6: note = (S)-2-amino-3-(2-fluorophenyl)-2-methylpropanoic acid
  SITE 10: note = 3-(4-pyridyl)-L-alanine
  SITE 11: note = Alpha-methyl-L-serine
  SITE 13: note = Alpha-methyl-L-leucine
  SITE 16: note = Ornithine
  SITE 17: note = Lysine is chemically modified through conjugation of the side chain with 2-[2-(2-amino-ethoxy)-ethoxy]-acetyl-Gamma-Glutamic acid-CO-(CH2)16-CO2H
  SITE 20: note = Alpha-methyl-L-3-(4-pyridyl)-L-alanine
  SITE 25: note = Alpha-methyl-L-tyrosine
  SITE 40: note = Lysine amide is chemically modified through conjugation of the side chain with 24x Polyethylene glycol-(7S,17S)-7,17-diamino-4,8,16,20-tetraoxo-12-(4-oxobu tanoyl)-5,9,12,15,19-pentaazatricosanedioic acid (BEA-Beta-MalDap2) which is attached to two Fc sequences

SEQ ID NO: 1178 - protein, 220 aa, synthetic construct
CGCPAPEAAGGPSVFLFPPKPKDTLMISRTPEVTCVVVDVSQEDPEVQFNWYVDGVEVHNAKTKPREEQFNSTYRVVSVLTVLHQDWLNGKEYKCKVSNKGLPSSIEKTISKAKGQPREPQVYTLPPSQEEMTKNQVSLTCLVKGFYPSDIAVEWESNGQPENNYKTTPPVLDSDGSFFLYSRLTVDKSRWQEGNVFSCSVMHEALHNHYTQKSLSLSLG

SEQ ID NO: 1179 - protein, 228 aa, synthetic construct
ESKYGPPCPPCPAPEAAGGPSVFLFPPKPKDTLMISRTPEVTCVVVDVSQEDPEVQFNWYVDGVEVHNAKTKPREEQFNSTYRVVSVLTVLHQDWLNGKEYKCKVSNKGLPSSIEKTISKAKGQPREPQVYTLPPSQEECTKNQVSLTCLVKGFYPSDIAVEWESNGQPENNYKTTPPVLDSDGSFFLYSRLTVDKSRWQEGNVFSCSVMHEALHNHYTQKSLSLSLG

SEQ ID NO: 1180 - protein, 228 aa, synthetic construct
ESKYGPPCPPCPAPEAAGGPSVFLFPPKPKDTLMISRTPEVTCVVVDVSQEDPEVQFNWYVDGVEVHNAKTKPREEQFNSTYRVVSVLTVLHQDWLNGKEYKCKVSNKGLPSSIEKTISKAKGQPREPQVYTLPPSQEEMTKNQVSLTCLVKGFYPSDIAVEWESNGQPENNYKTTPPVCDSDGSFFLYSRLTVDKSRWQEGNVFSCSVMHEALHNHYTQKSLSLSLG

SEQ ID NO: 1181 - protein, 228 aa, synthetic construct
ESKYGPPCPPCPAPEAAGGPSVFLFPPKPKDTLMISRTPEVTCVVVDVSQEDPEVQFNWYVDGVEVHNAKTKPREEQFNSTYRVVSVLTVLHQDWLNGKEYKCKVSNKGLPSSIEKTISKAKGQPREPQVYTLPPSQEEMTKNQVSLTCLVKGFYPSDIAVEWESNGQPENNYKTTPPVLDSDGSFFLYSRLTVDKCRWQEGNVFSCSVMHEALHNHYTQKSLSLSLG

SEQ ID NO: 1182 - protein, 15 aa, synthetic construct
GGGGSGGGGSGGGGS

SEQ ID NO: 1183 - protein, 5 aa, synthetic construct
GGGGS

SEQ ID NO: 1184 - protein, 13 aa, synthetic construct
GPAPAPAPAPAPA

SEQ ID NO: 1185 - protein, 17 aa, synthetic construct
GPAPAPAPAPAPAPAPA

SEQ ID NO: 1186 - protein, 16 aa, synthetic construct
GKAAAEKAAAEKAAAE

SEQ ID NO: 1187 - protein, 26 aa, synthetic construct
LEAEAAAKEAAAKEAAAKEAAAKALE

SEQ ID NO: 1188 - protein, 20 aa, synthetic construct
GGGGSGGGGSGGGGSGGGGS

SEQ ID NO: 1189 - protein, 25 aa, synthetic construct
GGGGSGGGGSGGGGSGGGGSGGGGS

SEQ ID NO: 1190 - protein, 16 aa, synthetic construct
PGGGGSGGGGSGGGGS

SEQ ID NO: 1191 - protein, 17 aa, synthetic construct
SPGGGGSGGGGSGGGGS

SEQ ID NO: 1192 - protein, 18 aa, synthetic construct
GGGGSGAPAPAPAPAPAP

SEQ ID NO: 1193 - protein, 23 aa, synthetic construct
GGGGSGGGGSGAPAPAPAPAPAP

SEQ ID NO: 1194 - protein, 21 aa, synthetic construct
GGGGSGEAAAKEAAAKEAAAK

SEQ ID NO: 1195 - protein, 26 aa, synthetic construct
GGGGSGGGGSGEAAAKEAAAKEAAAK

SEQ ID NO: 1196 - protein, 14 aa, synthetic construct
GGGGSGAPAPAPAP

SEQ ID NO: 1197 - protein, 22 aa, synthetic construct
GGGGSGGGGSGGGGSGAPAPAP

SEQ ID NO: 1198 - protein, 27 aa, synthetic construct
GGGGSGGGGSGGGGSGGGGSGAPAPAP

SEQ ID NO: 1199 - protein, 30 aa, synthetic construct
GGGGSGGGGSEAAAKEAAAKEAAAKEAAAK

SEQ ID NO: 1200 - protein, 31 aa, synthetic construct
GGGGSGGGGSGGGGSGEAAAKEAAAKEAAAK

SEQ ID NO: 1201 - protein, 36 aa, synthetic construct
GGGGSGGGGSGGGGSGGGGSGEAAAKEAAAKEAAAK

SEQ ID NO: 1202 - protein, 27 aa, synthetic construct
GGGGSGGGGSGAPAPAPAPAPAPAPAP

SEQ ID NO: 1203 - protein, 28 aa, synthetic construct
GGGGSGGGGSGGGGSGAPAPAPAPAPAP

SEQ ID NO: 1204 - protein, 33 aa, synthetic construct
GGGGSGGGGSGGGGSGGGGSGAPAPAPAPAPAP

SEQ ID NO: 1205 - protein, 15 aa, synthetic construct
GGGGQGGGGQGGGGQ

SEQ ID NO: 1206 - protein, 20 aa, synthetic construct
GGGGQGGGGQGGGGQGGGGQ

SEQ ID NO: 1207 - protein, 25 aa, synthetic construct
GGGGQGGGGQGGGGQGGGGQGGGGQ

SEQ ID NO: 1208 - protein, 21 aa, synthetic construct
GGGGSGGGGSGGGGSGGGGSG

SEQ ID NO: 1209 - protein, 29 aa, synthetic construct
SGGGGSGGGGSGGGGGPAPAPAPAPAPAG

SEQ ID NO: 1210 - protein, 32 aa, synthetic construct
SGGGGSGGGGSGGGGGKAAAEKAAAEKAAAEG

SEQ ID NO: 1211 - protein, 22 aa, synthetic construct
APAPAPAPAPAPGGGGSGGGGS

SEQ ID NO: 1212 - protein, 28 aa, synthetic construct
GGGGSGGGGSGGGGSGEPEPEPEPEPEP

SEQ ID NO: 1213 - protein, 18 aa, synthetic construct
GGGGSGEPEPEPEPEPEP

SEQ ID NO: 1214 - protein, 28 aa, synthetic construct
GGGGQGGGGQGGGGQGEPEPEPEPEPEP

SEQ ID NO: 1215 - protein, 13 aa, synthetic construct
GPEPEPEPEPEPE

SEQ ID NO: 1216 - protein, 13 aa, synthetic construct
GPKPKPKPKPKPK

SEQ ID NO: 1217 - protein, 13 aa, synthetic construct
GEPEPEPEPEPEP

SEQ ID NO: 1218 - protein, 41 aa, synthetic construct
  VARIANT 1: note = H, N-Methyl-L-tyrosine, or Y
  VARIANT 2: note = 1-Aminocyclobutane-1-carboxylic acid, 2-aminoisobutyric acid, Alpha-methyl-L-serine, L-isovaline, or D-Alanine
  VARIANT 3: note = Q, E, or H
  VARIANT 4: note = G or D-Alanine
  VARIANT 6: note = (S)-2-amino-3-(2-fluorophenyl)-2-methylpropanoic acid, F, or Alpha-methyl-L-phenylalanine
  VARIANT 10: note = 3-(4-pyridyl)-L-alanine, Y, or V
  VARIANT 11: note = 2-aminoisobutyric acid, S, or Alpha-methyl-L-serine
  VARIANT 12: note = I or S
  VARIANT 13: note = L or Alpha-methyl-L-leucine
  VARIANT 15: note = D or E
  VARIANT 16: note = K, E or Ornithine
  VARIANT 19: note = A or Q
  VARIANT 20: note = 2-aminoisobutyric acid, Alpha-methyl-L-leucine, L-isovaline, or Alpha-methyl-L-3-(4-pyridyl)-L-alanine
  VARIANT 21: note = E, Q, D, or Ornithine
  VARIANT 24: note = K, Q, E, D-Glutamic acid, or D-Glutamine
  VARIANT 25: note = Alpha-methyl-L-tyrosine, W, or Y
  VARIANT 27: note = I, L, or V
  VARIANT 28: note = K, E or A
  VARIANT 29: note = 2-aminoisobutyric acid, G, S or Q
  VARIANT 30: note = G, H or S
  VARIANT 31: note = P, G, E, or Ornithine
  VARIANT 32: note = absent, K, S or P
  VARIANT 33: note = S or absent
  VARIANT 34: note = G, 2-aminoisobutyric acid, or absent
  VARIANT 35: note = absent, A or Ornithine
  VARIANT 36: note = absent or P
  VARIANT 37: note = absent or P
  VARIANT 38: note = absent, P or 1-aminocyclopropanecarboxylic acid
  VARIANT 39: note = absent, S, Ornithine, or G
  VARIANT 40: note = absent, K, or G
  VARIANT 41: note = absent, S or G
XXXXTXTSDXXXXLXXKAXXXFIXXLXXXXXXXXXXXXXXX

SEQ ID NO: 1219 - protein, 41 aa, synthetic construct
  VARIANT 2: note = 2-aminoisobutyric acid
  VARIANT 6: note = (S)-2-amino-3-(2-fluorophenyl)-2-methylpropanoic acid, F, or Alpha-methyl-L-phenylalanine
  VARIANT 10: note = 3-(4-pyridyl)-L-alanine, Y, or V
  VARIANT 11: note = 2-aminoisobutyric acid or S
  VARIANT 12: note = I or S
  VARIANT 13: note = L or Alpha-methyl-L-leucine
  VARIANT 15: note = D or E
  VARIANT 16: note = E or Ornithine
  VARIANT 20: note = 2-aminoisobutyric acid, Alpha-methyl-L-leucine, or L-isovaline
  VARIANT 21: note = E, Q, D, or Ornithine
  VARIANT 24: note = K, Q, E, or D-Glutamic acid
  VARIANT 25: note = Alpha-methyl-L-tyrosine or Y
  VARIANT 27: note = I, L, or V
  VARIANT 28: note = K, E or A
  VARIANT 29: note = 2-aminoisobutyric acid, G, or Q
  VARIANT 30: note = G or S
  VARIANT 31: note = P, G, E, or Ornithine
  VARIANT 32: note = absent, K, S, or P
  VARIANT 33: note = S or absent
  VARIANT 34: note = G, 2-aminoisobutyric acid, or absent
  VARIANT 35: note = absent, A, or Ornithine
  VARIANT 36: note = absent or P
  VARIANT 37: note = absent or P
  VARIANT 38: note = absent or P
  VARIANT 39: note = absent, S, Ornithine, or G
  VARIANT 40: note = absent, K, or G
  VARIANT 41: note = absent, S, or G
YXEGTXTSDXXXXLXXKAQXXFIXXLXXXXXXXXXXXXXXX

SEQ ID NO: 1220 - protein, 41 aa, synthetic construct
  VARIANT 1: note = H, N-Methyl-L-tyrosine, or Y
  VARIANT 2: note = 1-Aminocyclobutane-1-carboxylic acid, 2-aminoisobutyric acid, Alpha-methyl-L-serine, L-isovaline, or D-Alanine
  VARIANT 3: note = Q, E, or H
  VARIANT 4: note = G or D-Alanine
  VARIANT 6: note = (S)-2-amino-3-(2-fluorophenyl)-2-methylpropanoic acid, F, or Alpha-methyl-L-phenylalanine
  VARIANT 10: note = 3-(4-pyridyl)-L-alanine, Y, or V
  VARIANT 11: note = 2-aminoisobutyric acid, S, or Alpha-methyl-L-serine
  VARIANT 12: note = I or S
  VARIANT 13: note = L or Alpha-methyl-L-leucine
  VARIANT 15: note = D or E
  VARIANT 16: note = E or Ornithine
  VARIANT 20: note = 2-aminoisobutyric acid, Alpha-methyl-L-leucine, L-isovaline, or Alpha-methyl-L-3-(4-pyridyl)-L-alanine
  VARIANT 21: note = E, Q, D, or Ornithine
  VARIANT 24: note = K, Q, E, D-Glutamic acid, or D-Glutamine
  VARIANT 25: note = Alpha-methyl-L-tyrosine or Y
  VARIANT 27: note = I, L, or V
  VARIANT 28: note = K, E or A
  VARIANT 29: note = 2-aminoisobutyric acid, S, G, or Q
  VARIANT 30: note = G, S or H
  VARIANT 31: note = P, G, E, or Ornithine
  VARIANT 32: note = absent, K, S or P
  VARIANT 33: note = S or absent
  VARIANT 34: note = G, 2-aminoisobutyric acid, or absent
  VARIANT 35: note = absent, A or Ornithine
  VARIANT 36: note = absent or P
  VARIANT 37: note = absent or P
  VARIANT 38: note = absent or P
  VARIANT 39: note = absent, S, Ornithine, or G
  VARIANT 40: note = absent, K, or G
  VARIANT 41: note = absent, S or G
XXXXTXTSDXXXXLXXKAQXXFIXXLXXXXXXXXXXXXXXX

SEQ ID NO: 1221 - protein, 30 aa, Homo sapiens
  MOD_RES 30: note = Amidation
HAEGTFTSDVSSYLEGQAAKEFIAWLVKGR

SEQ ID NO: 1222 - protein, 29 aa, Homo sapiens
HSQGTFTSDYSKYLDSRRAQDFVQWLMNT

SEQ ID NO: 1223 - protein, 42 aa, Homo sapiens
  MOD_RES 42: note = Amidation
YAEGTFISDYSIAMDKIHQQDFVNWLLAQKGKKNDWKHNITQ
